United States Patent Application Publication US 2017/0204474 A1 - sequence listing, part 3

SEQ ID NO: 17975 - DNA, 21 bp, Artificial Sequence
  Description of Artificial Sequence: Synthetic primer
cacttaacttgcacgcactca

SEQ ID NO: 17976 - DNA, 22 bp, Artificial Sequence
  Description of Artificial Sequence: Synthetic primer
gatagataccgcacctgggaat

SEQ ID NO: 17977 - DNA, 25 bp, Artificial Sequence
  Description of Artificial Sequence: Synthetic primer
tttggcaatcgacaactctacagat

SEQ ID NO: 17978 - DNA, 18 bp, Artificial Sequence
  Description of Artificial Sequence: Synthetic primer
tcgccgtattcggtgtct

SEQ ID NO: 17979 - DNA, 21 bp, Artificial Sequence
  Description of Artificial Sequence: Synthetic primer
cacggatcttagagccaccaa

SEQ ID NO: 17980 - DNA, 18 bp, Artificial Sequence
  Description of Artificial Sequence: Synthetic primer
cctgtgtgccttgctggt

SEQ ID NO: 17981 - DNA, 21 bp, Artificial Sequence
  Description of Artificial Sequence: Synthetic primer
atgaactactacccggtggct

SEQ ID NO: 17982 - DNA, 27 bp, Artificial Sequence
  Description of Artificial Sequence: Synthetic primer
cgcataatccagcagatttctatctgt

SEQ ID NO: 17983 - DNA, 21 bp, Artificial Sequence
  Description of Artificial Sequence: Synthetic primer
gttctagcttgcccgagagag

SEQ ID NO: 17984 - DNA, 25 bp, Artificial Sequence
  Description of Artificial Sequence: Synthetic primer
gtccatactacacatcaacaagcag

SEQ ID NO: 17985 - DNA, 24 bp, Artificial Sequence
  Description of Artificial Sequence: Synthetic primer
aaaaatgcaaggtatgctctggac

SEQ ID NO: 17986 - DNA, 21 bp, Artificial Sequence
  Description of Artificial Sequence: Synthetic primer
tctcctcttgttgggtcgttg

SEQ ID NO: 17987 - DNA, 25 bp, Artificial Sequence
  Description of Artificial Sequence: Synthetic primer
gttgcaatcattcaactctggcaat

SEQ ID NO: 17988 - DNA, 23 bp, Artificial Sequence
  Description of Artificial Sequence: Synthetic primer
ctgtcatcgtctccaagtcttgc

SEQ ID NO: 17989 - DNA, 26 bp, Artificial Sequence
  Description of Artificial Sequence: Synthetic primer
cttattgaaaacaggccactattggt

SEQ ID NO: 17990 - DNA, 22 bp, Artificial Sequence
  Description of Artificial Sequence: Synthetic primer
tgagagcgcataaattgcttgg

SEQ ID NO: 17991 - DNA, 26 bp, Artificial Sequence
  Description of Artificial Sequence: Synthetic primer
agattgtgttccagaagatggtgtag

SEQ ID NO: 17992 - DNA, 21 bp, Artificial Sequence
  Description of Artificial Sequence: Synthetic primer
aagatggtaccacgtcccaag

SEQ ID NO: 17993 - DNA, 21 bp, Artificial Sequence
  Description of Artificial Sequence: Synthetic primer
ttgatctcacagttgctgcca

SEQ ID NO: 17994 - DNA, 22 bp, Artificial Sequence
  Description of Artificial Sequence: Synthetic primer
gaagattcctgattcggtccgt

SEQ ID NO: 17995 - DNA, 23 bp, Artificial Sequence
  Description of Artificial Sequence: Synthetic primer
agagctgagcctttctgaagtag

SEQ ID NO: 17996 - DNA, 22 bp, Artificial Sequence
  Description of Artificial Sequence: Synthetic primer
caggcagttttcagggtttctc

SEQ ID NO: 17997 - DNA, 21 bp, Artificial Sequence
  Description of Artificial Sequence: Synthetic primer
aaaggatttgtgtgcgtgagg

SEQ ID NO: 17998 - DNA, 21 bp, Artificial Sequence
  Description of Artificial Sequence: Synthetic primer
ttaccaccgttccctttgtct

SEQ ID NO: 17999 - DNA, 21 bp, Artificial Sequence
  Description of Artificial Sequence: Synthetic primer
ctctagtggcaacgagctcag

SEQ ID NO: 18000 - DNA, 24 bp, Artificial Sequence
  Description of Artificial Sequence: Synthetic primer
gcaagaagttcctgagcagaatca

SEQ ID NO: 18001 - DNA, 25 bp, Artificial Sequence
  Description of Artificial Sequence: Synthetic primer
ctcgttggaactcgttgatatcagt

SEQ ID NO: 18002 - DNA, 27 bp, Artificial Sequence
  Description of Artificial Sequence: Synthetic primer
gaattggaatatccgagtacaaagctc

SEQ ID NO: 18003 - DNA, 22 bp, Artificial Sequence
  Description of Artificial Sequence: Synthetic primer
ggcgtatcaaaagactgggaac

SEQ ID NO: 18004 - DNA, 21 bp, Artificial Sequence
  Description of Artificial Sequence: Synthetic primer
caggcgggcactttagattca

SEQ ID NO: 18005 - DNA, 22 bp, Artificial Sequence
  Description of Artificial Sequence: Synthetic primer
caacggcagccaatttttcatc

SEQ ID NO: 18006 - DNA, 26 bp, Artificial Sequence
  Description of Artificial Sequence: Synthetic primer
ggtctgagttaaaatccttcactgct

SEQ ID NO: 18007 - DNA, 19 bp, Artificial Sequence
  Description of Artificial Sequence: Synthetic primer
gcagtgcaacatccacagg

SEQ ID NO: 18008 - DNA, 23 bp, Artificial Sequence
  Description of Artificial Sequence: Synthetic primer
tggttatcaaggatgacgctgat

SEQ ID NO: 18009 - DNA, 24 bp, Artificial Sequence
  Description of Artificial Sequence: Synthetic primer
cttccttggaatgtgtagccattg

SEQ ID NO: 18010 - DNA, 23 bp, Artificial Sequence
  Description of Artificial Sequence: Synthetic primer
tgctttgaagtgctcatacgagt

SEQ ID NO: 18011 - DNA, 25 bp, Artificial Sequence
  Description of Artificial Sequence: Synthetic primer
acctgcacaagatttaattccctga

SEQ ID NO: 18012 - DNA, 21 bp, Artificial Sequence
  Description of Artificial Sequence: Synthetic primer
gatcgacgcgctcaagaagat

SEQ ID NO: 18013 - DNA, 21 bp, Artificial Sequence
  Description of Artificial Sequence: Synthetic primer
cacctcctacctccagactgt

SEQ ID NO: 18014 - DNA, 21 bp, Artificial Sequence
  Description of Artificial Sequence: Synthetic primer
ccgtcgaagctcctgagaaag

SEQ ID NO: 18015 - DNA, 26 bp, Artificial Sequence
  Description of Artificial Sequence: Synthetic primer
agaatgagcttttctttccatagcca

SEQ ID NO: 18016 - DNA, 22 bp, Artificial Sequence
  Description of Artificial Sequence: Synthetic primer
gctttaaaaggtcccgtcgaac

SEQ ID NO: 18017 - DNA, 25 bp, Artificial Sequence
  Description of Artificial Sequence: Synthetic primer
agattccaccaagtaacgacaatgt

SEQ ID NO: 18018 - DNA, 21 bp, Artificial Sequence
  Description of Artificial Sequence: Synthetic primer
gccatactgcctaacgtcgtc

SEQ ID NO: 18019 - DNA, 22 bp, Artificial Sequence
  Description of Artificial Sequence: Synthetic primer
tgctatagaacagctgctccac

SEQ ID NO: 18020 - DNA, 25 bp, Artificial Sequence
  Description of Artificial Sequence: Synthetic primer
gcacgaagcaaaaggatattgcata

SEQ ID NO: 18021 - DNA, 21 bp, Artificial Sequence
  Description of Artificial Sequence: Synthetic primer
gatttcatcgccggccatttc

SEQ ID NO: 18022 - DNA, 24 bp, Artificial Sequence
  Description of Artificial Sequence: Synthetic primer
agcatctccacatgtttttgaggt

SEQ ID NO: 18023 - DNA, 27 bp, Artificial Sequence
  Description of Artificial Sequence: Synthetic primer
tcgacaatgccattattattcctcaga

SEQ ID NO: 18024 - DNA, 26 bp, Artificial Sequence
  Description of Artificial Sequence: Synthetic primer
gggctcacatctttctaatctatggt

SEQ ID NO: 18025 - DNA, 23 bp, Artificial Sequence
  Description of Artificial Sequence: Synthetic primer
acgacaaaggcagctttaacatc

SEQ ID NO: 18026 - DNA, 21 bp, Artificial Sequence
  Description of Artificial Sequence: Synthetic primer
gagcttgatgttcggcgattg

SEQ ID NO: 18027 - DNA, 21 bp, Artificial Sequence
  Description of Artificial Sequence: Synthetic primer
gagccttccttcgttggtctc

SEQ ID NO: 18028 - DNA, 21 bp, Artificial Sequence
  Description of Artificial Sequence: Synthetic primer
cggaagtcctttcctctcgac

SEQ ID NO: 18029 - DNA, 21 bp, Artificial Sequence
  Description of Artificial Sequence: Synthetic primer
aaagcagatcgtgcactccat

SEQ ID NO: 18030 - DNA, 19 bp, Artificial Sequence
  Description of Artificial Sequence: Synthetic primer
agcattgacggtgcctgac

SEQ ID NO: 18031 - DNA, 22 bp, Artificial Sequence
  Description of Artificial Sequence: Synthetic primer
aaccgattgtgctttttgccat

SEQ ID NO: 18032 - DNA, 28 bp, Artificial Sequence
  Description of Artificial Sequence: Synthetic primer
tcttcctatcattgtgaagcagaattca

SEQ ID NO: 18033 - DNA, 24 bp, Artificial Sequence
  Description of Artificial Sequence: Synthetic primer
ccgtcaaagattgttgcttcgtac

SEQ ID NO: 18034 - DNA, 28 bp, Artificial Sequence
  Description of Artificial Sequence: Synthetic primer
actgatcatcatgccatctttattcctt

SEQ ID NO: 18035 - DNA, 28 bp, Artificial Sequence
  Description of Artificial Sequence: Synthetic primer
atcatgtaggatgaggtatgtatgggaa

SEQ ID NO: 18036 - DNA, 26 bp, Artificial Sequence
  Description of Artificial Sequence: Synthetic primer
tgtaccattgaacgattttctgaacg

SEQ ID NO: 18037 - DNA, 23 bp, Artificial Sequence
  Description of Artificial Sequence: Synthetic primer
tcgtaatgttgggctgtttctct

SEQ ID NO: 18038 - DNA, 21 bp, Artificial Sequence
  Description of Artificial Sequence: Synthetic primer
gagactaccttggtggtgtcc

SEQ ID NO: 18039 - DNA, 21 bp, Artificial Sequence
  Description of Artificial Sequence: Synthetic primer
gatgatgatctccgtgcgcat

SEQ ID NO: 18040 - DNA, 23 bp, Artificial Sequence
  Description of Artificial Sequence: Synthetic primer
cctgcagaatccatcatctagcc

SEQ ID NO: 18041 - DNA, 25 bp, Artificial Sequence
  Description of Artificial Sequence: Synthetic primer
atcttcccaaaactcctccttgtag

SEQ ID NO: 18042 - DNA, 22 bp, Artificial Sequence
  Description of Artificial Sequence: Synthetic primer
tgatgttcttcaccttcttgcg

SEQ ID NO: 18043 - DNA, 22 bp, Artificial Sequence
  Description of Artificial Sequence: Synthetic primer
ggcacaagtcgtattgtcttgc

SEQ ID NO: 18044 - DNA, 19 bp, Artificial Sequence
  Description of Artificial Sequence: Synthetic primer
cgtacccgcactatgcgta

SEQ ID NO: 18045 - DNA, 26 bp, Artificial Sequence
  Description of Artificial Sequence: Synthetic primer
ggagggatttcatcagattttccaac

SEQ ID NO: 18046 - DNA, 22 bp, Artificial Sequence
  Description of Artificial Sequence: Synthetic primer
ccgatcctcctgtgttctcaat

SEQ ID NO: 18047 - DNA, 21 bp, Artificial Sequence
  Description of Artificial Sequence: Synthetic primer
aagatggaacttccggagtgg

SEQ ID NO: 18048 - DNA, 21 bp, Artificial Sequence
  Description of Artificial Sequence: Synthetic primer
cagacaggtgactagcttcgc

SEQ ID NO: 18049 - DNA, 25 bp, Artificial Sequence
  Description of Artificial Sequence: Synthetic primer
ttgtctccagcacattcataacaac

SEQ ID NO: 18050 - DNA, 22 bp, Artificial Sequence
  Description of Artificial Sequence: Synthetic primer
ctagatgagaagcgccatcact

SEQ ID NO: 18051 - DNA, 21 bp, Artificial Sequence
  Description of Artificial Sequence: Synthetic primer
actctagaggtcgtggtcctg

SEQ ID NO: 18052 - DNA, 22 bp, Artificial Sequence
  Description of Artificial Sequence: Synthetic primer
aatcactggtggtgccaaagta

SEQ ID NO: 18053 - DNA, 26 bp, Artificial Sequence
  Description of Artificial Sequence: Synthetic primer
aaatataaatgtgcctcacggcattt

SEQ ID NO: 18054 - DNA, 24 bp, Artificial Sequence
  Description of Artificial Sequence: Synthetic primer
agcaactaacgggcagataaactt

SEQ ID NO: 18055 - DNA, 24 bp, Artificial Sequence
  Description of Artificial Sequence: Synthetic primer
actgcttctcgagtctcttgtttc

SEQ ID NO: 18056 - DNA, 25 bp, Artificial Sequence
  Description of Artificial Sequence: Synthetic primer
tgaatcaatccatcagtcaccatca

SEQ ID NO: 18057 - DNA, 25 bp, Artificial Sequence
  Description of Artificial Sequence: Synthetic primer
cgttgaaagttgattgcaccataga

SEQ ID NO: 18058 - DNA, 23 bp, Artificial Sequence
  Description of Artificial Sequence: Synthetic primer
tgattgacagagaggtagagcga

SEQ ID NO: 18059 - DNA, 19 bp, Artificial Sequence
  Description of Artificial Sequence: Synthetic primer
tgtcgaagctgaccctgac

SEQ ID NO: 18060 - DNA, 28 bp, Artificial Sequence
  Description of Artificial Sequence: Synthetic primer
acaagtggacaatgatctgataaagtga

SEQ ID NO: 18061 - DNA, 23 bp, Artificial Sequence
  Description of Artificial Sequence: Synthetic primer
gcggataaatctacctcctcacg

SEQ ID NO: 18062 - DNA, 28 bp, Artificial Sequence
  Description of Artificial Sequence: Synthetic primer
acttgcagtgtgaatcatctctatgatc

SEQ ID NO: 18063 - DNA, 25 bp, Artificial Sequence
  Description of Artificial Sequence: Synthetic primer
gtagttttagaaatcaccgcatccg

SEQ ID NO: 18064 - DNA, 24 bp, Artificial Sequence
  Description of Artificial Sequence: Synthetic primer
atcgactcaccgaaatgacaaaga

SEQ ID NO: 18065 - DNA, 22 bp, Artificial Sequence
  Description of Artificial Sequence: Synthetic primer
attcctctgagtatgggtcgca

SEQ ID NO: 18066 - DNA, 28 bp, Artificial Sequence
  Description of Artificial Sequence: Synthetic primer
tcctgaatgaacctcaaaacctatttga

SEQ ID NO: 18067 - DNA, 18 bp, Artificial Sequence
  Description of Artificial Sequence: Synthetic primer
ggcacctgcacatttggc

SEQ ID NO: 18068 - DNA, 28 bp, Artificial Sequence
  Description of Artificial Sequence: Synthetic primer
cctttgctacttcaatgaagatggattt

SEQ ID NO: 18069 - DNA, 23 bp, Artificial Sequence
  Description of Artificial Sequence: Synthetic primer
ccgctttatggtctgggattttc

SEQ ID NO: 18070 - DNA, 26 bp, Artificial Sequence
  Description of Artificial Sequence: Synthetic primer
ccacaggacgactataattggacatc

SEQ ID NO: 18071 - DNA, 29 bp, Artificial Sequence
  Description of Artificial Sequence: Synthetic primer
ttcattacaataccgacaccaaataacct

SEQ ID NO: 18072 - DNA, 27 bp, Artificial Sequence
  Description of Artificial Sequence: Synthetic primer
gttcatatatgcagtctcctaagtacg

SEQ ID NO: 18073 - DNA, 21 bp, Artificial Sequence
  Description of Artificial Sequence: Synthetic primer
ccccagttctacaccatggag

SEQ ID NO: 18074 - DNA, 27 bp, Artificial Sequence
  Description of Artificial Sequence: Synthetic primer
tgtggattacattcttgtgcatacttg

SEQ ID NO: 18075 - DNA, 26 bp, Artificial Sequence
  Description of Artificial Sequence: Synthetic primer
tttgaatatttcgtcaacctccttcg

SEQ ID NO: 18076 - DNA, 21 bp, Artificial Sequence
  Description of Artificial Sequence: Synthetic primer
tcctagcggttgcccatagat

SEQ ID NO: 18077 - DNA, 26 bp, Artificial Sequence
  Description of Artificial Sequence: Synthetic primer
ccaattgttcatctgagcatctgcta

SEQ ID NO: 18078 - DNA, 22 bp, Artificial Sequence
  Description of Artificial Sequence: Synthetic primer
tgcagaggagactattgacgga

SEQ ID NO: 18079 - DNA, 24 bp, Artificial Sequence
  Description of Artificial Sequence: Synthetic primer
caacgacacgacagaatgatgaac

SEQ ID NO: 18080 - DNA, 26 bp, Artificial Sequence
  Description of Artificial Sequence: Synthetic primer
acagcagaactcatttttcaacaact

SEQ ID NO: 18081 - DNA, 21 bp, Artificial Sequence
  Description of Artificial Sequence: Synthetic primer
gagcacatgttcatggtagcc

SEQ ID NO: 18082 - DNA, 21 bp, Artificial Sequence
  Description of Artificial Sequence: Synthetic primer
tctcttaaggcaagcaaccca

SEQ ID NO: 18083 - DNA, 22 bp, Artificial Sequence
  Description of Artificial Sequence: Synthetic primer
aaccatgctatagctggacagg

SEQ ID NO: 18084 - DNA, 22 bp, Artificial Sequence
  Description of Artificial Sequence: Synthetic primer
tggctgatctactttcttcgct

SEQ ID NO: 18085 - DNA, 21 bp, Artificial Sequence
  Description of Artificial Sequence: Synthetic primer
cgaaccttacaactgcccaag

SEQ ID NO: 18086 - DNA, 25 bp, Artificial Sequence
  Description of Artificial Sequence: Synthetic primer
gaagaatgaatgaataacggtggca

SEQ ID NO: 18087 - DNA, 23 bp, Artificial Sequence
  Description of Artificial Sequence: Synthetic primer
tctgcttgtgccttgatgagatt

SEQ ID NO: 18088 - DNA, 27 bp, Artificial Sequence
  Description of Artificial Sequence: Synthetic primer
aacaaagtaggcattgaactggtaatg

SEQ ID NO: 18089 - DNA, 27 bp, Artificial Sequence
  Description of Artificial Sequence: Synthetic primer
agttactcctgatgtccctaaaaatgg

SEQ ID NO: 18090 - DNA, 21 bp, Artificial Sequence
  Description of Artificial Sequence: Synthetic primer
tggagacccgggattcttgat

SEQ ID NO: 18091 - DNA, 21 bp, Artificial Sequence
  Description of Artificial Sequence: Synthetic primer
gttcagagccagcactaacct

SEQ ID NO: 18092 - DNA, 22 bp, Artificial Sequence
  Description of Artificial Sequence: Synthetic primer
cagcattgatggatcactccca

SEQ ID NO: 18093 - DNA, 26 bp, Artificial Sequence
  Description of Artificial Sequence: Synthetic primer
ccatcatgtagcaacctgcttttact

SEQ ID NO: 18094 - DNA, 25 bp, Artificial Sequence
  Description of Artificial Sequence: Synthetic primer
acttttcttcatgatctcccatcgt

SEQ ID NO: 18095 - DNA, 25 bp, Artificial Sequence
  Description of Artificial Sequence: Synthetic primer
gaacaaactgttcctacagcacttg

SEQ ID NO: 18096 - DNA, 19 bp, Artificial Sequence
  Description of Artificial Sequence: Synthetic primer
caggcatgagcaccacatg

SEQ ID NO: 18097 - DNA, 22 bp, Artificial Sequence
  Description of Artificial Sequence: Synthetic primer
gcatgccaataccacagaatcc

SEQ ID NO: 18098 - DNA, 21 bp, Artificial Sequence
  Description of Artificial Sequence: Synthetic primer
actcaaccgaagcagagtcac

SEQ ID NO: 18099 - DNA, 21 bp, Artificial Sequence
  Description of Artificial Sequence: Synthetic primer
gcgatgctgtactgcttgtac

SEQ ID NO: 18100 - DNA, 28 bp, Artificial Sequence
  Description of Artificial Sequence: Synthetic primer
cagaatcgaaatgtctaccatcaaactg

SEQ ID NO: 18101 - DNA, 20 bp, Artificial Sequence
  Description of Artificial Sequence: Synthetic primer
cgtcaagaaccagggttcgt

SEQ ID NO: 18102 - DNA, 23 bp, Artificial Sequence
  Description of Artificial Sequence: Synthetic primer
ctttaccagtcctcttcacccaa

SEQ ID NO: 18103 - DNA, 24 bp, Artificial Sequence
  Description of Artificial Sequence: Synthetic primer
ccagtagttgccctgaagttatcc

SEQ ID NO: 18104 - DNA, 21 bp, Artificial Sequence
  Description of Artificial Sequence: Synthetic primer
gctgatatcacagcgtgacca

SEQ ID NO: 18105 - DNA, 29 bp, Artificial Sequence
  Description of Artificial Sequence: Synthetic primer
aacatgaacttttatttccacctttgact

SEQ ID NO: 18106 - DNA, 21 bp, Artificial Sequence
  Description of Artificial Sequence: Synthetic primer
gccatgtgctgtcaggtatga

SEQ ID NO: 18107 - DNA, 28 bp, Artificial Sequence
  Description of Artificial Sequence: Synthetic primer
acttcttgaggatagatacatctttcgc

SEQ ID NO: 18108 - DNA, 22 bp, Artificial Sequence
  Description of Artificial Sequence: Synthetic primer
gagactctcaaaggtccggatc

SEQ ID NO: 18109 - DNA, 21 bp, Artificial Sequence
  Description of Artificial Sequence: Synthetic primer
gtgctcacattcttcgtgctc

SEQ ID NO: 18110 - DNA, 21 bp, Artificial Sequence
  Description of Artificial Sequence: Synthetic primer
accagttcacagctctcagtc

SEQ ID NO: 18111 - DNA, 28 bp, Artificial Sequence
  Description of Artificial Sequence: Synthetic primer
acacatcaaaacaaaacctacgtacatt

SEQ ID NO: 18112 - DNA, 23 bp, Artificial Sequence
  Description of Artificial Sequence: Synthetic primer
ggatatgggtcggcctgattatg

SEQ ID NO: 18113 - DNA, 25 bp, Artificial Sequence
  Description of Artificial Sequence: Synthetic primer
actaaatagaacatgctggcgatct

SEQ ID NO: 18114 - DNA, 25 bp, Artificial Sequence
  Description of Artificial Sequence: Synthetic primer
ttcaacactcttgctcagattttgg

SEQ ID NO: 18115 - DNA, 21 bp, Artificial Sequence
  Description of Artificial Sequence: Synthetic primer
tttgttgggaatggcctcgaa

SEQ ID NO: 18116 - DNA, 18 bp, Artificial Sequence
  Description of Artificial Sequence: Synthetic primer
ggcacatgatgctcacca

SEQ ID NO: 18117 - DNA, 27 bp, Artificial Sequence
  Description of Artificial Sequence: Synthetic primer
acaagaagatgctatttaagctagcca

SEQ ID NO: 18118 - DNA, 24 bp, Artificial Sequence
  Description of Artificial Sequence: Synthetic primer
acgagatcagaatcagttgggaat

SEQ ID NO: 18119 - DNA, 21 bp, Artificial Sequence
  Description of Artificial Sequence: Synthetic primer
gcatgcttggttgatgcaagt

SEQ ID NO: 18120 - DNA, 28 bp, Artificial Sequence
  Description of Artificial Sequence: Synthetic primer
cgagaggacttttctagtaccaattgtc

SEQ ID NO: 18121 - DNA, 24 bp, Artificial Sequence
  Description of Artificial Sequence: Synthetic primer
cctcgatttctcgatccatttcgg

SEQ ID NO: 18122 - DNA, 21 bp, Artificial Sequence
  Description of Artificial Sequence: Synthetic primer
tcgtgtatggttagccctacg

SEQ ID NO: 18123 - DNA, 23 bp, Artificial Sequence
  Description of Artificial Sequence: Synthetic primer
ccttgcatctctgtatgtggtgt

SEQ ID NO: 18124 - DNA, 23 bp, Artificial Sequence
  Description of Artificial Sequence: Synthetic primer
gcggataacatgatgaggagctg

SEQ ID NO: 18125 - DNA, 21 bp, Artificial Sequence
  Description of Artificial Sequence: Synthetic primer
gctcatctcggcgaacaaaat

SEQ ID NO: 18126 - DNA, 23 bp, Artificial Sequence
  Description of Artificial Sequence: Synthetic primer
ggcacgaacatacatatccccaa

SEQ ID NO: 18127 - DNA, 24 bp, Artificial Sequence
  Description of Artificial Sequence: Synthetic primer
gctttggcttatggcactctttac

SEQ ID NO: 18128 - DNA, 21 bp, Artificial Sequence
  Description of Artificial Sequence: Synthetic primer
ctgttgtttctgctgccctca

SEQ ID NO: 18129 - DNA, 19 bp, Artificial Sequence
  Description of Artificial Sequence: Synthetic primer
ggtgggtagccttgacctg

SEQ ID NO: 18130 - DNA, 23 bp, Artificial Sequence
  Description of Artificial Sequence: Synthetic primer
cgctatttcttcccccaatcagt

SEQ ID NO: 18131 - DNA, 28 bp, Artificial Sequence
  Description of Artificial Sequence: Synthetic primer
catgttacagggttgtactttgacctta

SEQ ID NO: 18132 - DNA, 23 bp, Artificial Sequence
  Description of Artificial Sequence: Synthetic primer
ctgctaatcaggttcacgctttc

SEQ ID NO: 18133 - DNA, 25 bp, Artificial Sequence
  Description of Artificial Sequence: Synthetic primer
agtgatggacggatattctcttacg

SEQ ID NO: 18134 - DNA, 25 bp, Artificial Sequence
  Description of Artificial Sequence: Synthetic primer
caagggcgtgtattcaaagttcaaa

SEQ ID NO: 18135 - DNA, 23 bp, Artificial Sequence
  Description of Artificial Sequence: Synthetic primer
gggccaatattttcccaagccta

SEQ ID NO: 18136 - DNA, 26 bp, Artificial Sequence
  Description of Artificial Sequence: Synthetic primer
agtggaatacaggcctaaaatatcgt

SEQ ID NO: 18137 - DNA, 26 bp, Artificial Sequence
  Description of Artificial Sequence: Synthetic primer
cttctattcgtggagagtgttctgag

SEQ ID NO: 18138 - DNA, 21 bp, Artificial Sequence
  Description of Artificial Sequence: Synthetic primer
ggaggtagagttctgcttccc

SEQ ID NO: 18139 - DNA, 21 bp, Artificial Sequence
  Description of Artificial Sequence: Synthetic primer
tttcctcgaagccagaccttt

SEQ ID NO: 18140 - DNA, 27 bp, Artificial Sequence
  Description of Artificial Sequence: Synthetic primer
aagttacaaatacagtagtaccgcagt

SEQ ID NO: 18141 - DNA, 21 bp, Artificial Sequence
  Description of Artificial Sequence: Synthetic primer
agacccgtgtcgaacttcttt

SEQ ID NO: 18142 - DNA, 26 bp, Artificial Sequence
  Description of Artificial Sequence: Synthetic primer
gcagacaattcagcacccaaaattat

SEQ ID NO: 18143 - DNA, 24 bp, Artificial Sequence
  Description of Artificial Sequence: Synthetic primer
tttttatgcaagagcgctagcttt

SEQ ID NO: 18144 - DNA, 27 bp, Artificial Sequence
  Description of Artificial Sequence: Synthetic primer
tgtacaaaaacaagcgattgaacttct

SEQ ID NO: 18145 - DNA, 21 bp, Artificial Sequence
  Description of Artificial Sequence: Synthetic primer
gcagcagcctcaatcatgttg

SEQ ID NO: 18146 - DNA, 23 bp, Artificial Sequence
  Description of Artificial Sequence: Synthetic primer
tgatcttgcagtaggcgtacatg

SEQ ID NO: 18147 - DNA, 21 bp, Artificial Sequence
  Description of Artificial Sequence: Synthetic primer
taaccggcttgtggtctcaaa

SEQ ID NO: 18148 - DNA, 21 bp, Artificial Sequence
  Description of Artificial Sequence: Synthetic primer
ccttgcaaccggtaaatgggt

SEQ ID NO: 18149 - DNA, 21 bp, Artificial Sequence
  Description of Artificial Sequence: Synthetic primer
ccagctcagcacactactcac

SEQ ID NO: 18150 - DNA, 28 bp, Artificial Sequence
  Description of Artificial Sequence: Synthetic primer
tcacaatcattacaaacacttgtttcct

SEQ ID NO: 18151 - DNA, 21 bp, Artificial Sequence
  Description of Artificial Sequence: Synthetic primer
catagagctgtgcaagaagcc

SEQ ID NO: 18152 - DNA, 22 bp, Artificial Sequence
  Description of Artificial Sequence: Synthetic primer
cgatgcaagacaactgagcttc

SEQ ID NO: 18153 - DNA, 28 bp, Artificial Sequence
  Description of Artificial Sequence: Synthetic primer
tgtaagcaaccaataatcacaaaaaggg

SEQ ID NO: 18154 - DNA, 22 bp, Artificial Sequence
  Description of Artificial Sequence: Synthetic primer
gcaccacaccacgtgtttattt

SEQ ID NO: 18155 - DNA, 20 bp, Artificial Sequence
  Description of Artificial Sequence: Synthetic primer
gcaagggaagcaatgatgcc

SEQ ID NO: 18156 - DNA, 23 bp, Artificial Sequence
  Description of Artificial Sequence: Synthetic primer
gttaaggacatgccaatggaacc

SEQ ID NO: 18157 - DNA, 23 bp, Artificial Sequence
  Description of Artificial Sequence: Synthetic primer
agatctactggtgatggaacacg

SEQ ID NO: 18158 - DNA, 21 bp, Artificial Sequence
  Description of Artificial Sequence: Synthetic primer
gggtaaaacagtagcctggca

SEQ ID NO: 18159 - DNA, 18 bp, Artificial Sequence
  Description of Artificial Sequence: Synthetic primer
ggcacgtggtgagtctgg

SEQ ID NO: 18160 - DNA, 19 bp, Artificial Sequence
  Description of Artificial Sequence: Synthetic primer
gcagaggagcgcattcttg

SEQ ID NO: 18161 - DNA, 24 bp, Artificial Sequence
  Description of Artificial Sequence: Synthetic primer
gaatgttgctgagtttcctggaag

SEQ ID NO: 18162 - DNA, 27 bp, Artificial Sequence
  Description of Artificial Sequence: Synthetic primer
cagatcaaaattaaacagcggtacagc

SEQ ID NO: 18163 - DNA, 22 bp, Artificial Sequence
  Description of Artificial Sequence: Synthetic primer
tggcgcaacattcaagaaatgg

SEQ ID NO: 18164 - DNA, 22 bp, Artificial Sequence
  Description of Artificial Sequence: Synthetic primer
ggatggagcccaagaatgaact

SEQ ID NO: 18165 - DNA, 27 bp, Artificial Sequence
  Description of Artificial Sequence: Synthetic primer
acaacgtcttgtattcaggttgaaaag

SEQ ID NO: 18166 - DNA, 27 bp, Artificial Sequence
  Description of Artificial Sequence: Synthetic primer
ccagagcaaacactcatgtatccaata

SEQ ID NO: 18167 - DNA, 23 bp, Artificial Sequence
  Description of Artificial Sequence: Synthetic primer
gggaacaggttaaaacacacgtc

SEQ ID NO: 18168 - DNA, 20 bp, Artificial Sequence
  Description of Artificial Sequence: Synthetic primer
cacgtggcgaactccgatat

SEQ ID NO: 18169 - DNA, 21 bp, Artificial Sequence
  Description of Artificial Sequence: Synthetic primer
caacgctctcatcctcggaat

SEQ ID NO: 18170 - DNA, 23 bp, Artificial Sequence
  Description of Artificial Sequence: Synthetic primer
gactataactgggcagcaaggat

SEQ ID NO: 18171 - DNA, 18 bp, Artificial Sequence
  Description of Artificial Sequence: Synthetic primer
actcccctgacgctcctc

SEQ ID NO: 18172 - DNA, 23 bp, Artificial Sequence
  Description of Artificial Sequence: Synthetic primer
atgagcagaaaagatcacacgca

SEQ ID NO: 18173 - DNA, 26 bp, Artificial Sequence
  Description of Artificial Sequence: Synthetic primer
gcttcttcctgctcgacatcaatata

SEQ ID NO: 18174 - DNA, 22 bp, Artificial Sequence
  Description of Artificial Sequence: Synthetic primer
tatcggtgggctcagactctac

SEQ ID NO: 18175 - DNA, 23 bp, Artificial Sequence
  Description of Artificial Sequence: Synthetic primer
accaaggatgaagacagttgagg

SEQ ID NO: 18176 - DNA, 19 bp, Artificial Sequence
  Description of Artificial Sequence: Synthetic primer
cgagtacgacctgctctgc

SEQ ID NO: 18177 - DNA, 24 bp, Artificial Sequence
  Description of Artificial Sequence: Synthetic primer
gacattgtacactctgttcttggc

SEQ ID NO: 18178 - DNA, 26 bp, Artificial Sequence
  Description of Artificial Sequence: Synthetic primer
tggaccgatgtcaaaaatttatgctc

SEQ ID NO: 18179 - DNA, 26 bp, Artificial Sequence
  Description of Artificial Sequence: Synthetic primer
cataatctagtactctctccgtccca

SEQ ID NO: 18180 - DNA, 26 bp, Artificial Sequence
  Description of Artificial Sequence: Synthetic primer
ttcactgaaaactggaaaccactaca

SEQ ID NO: 18181 - DNA, 21 bp, Artificial Sequence
  Description of Artificial Sequence: Synthetic primer
acatcccatccgatgcgttac

SEQ ID NO: 18182 - DNA, 21 bp, Artificial Sequence
  Description of Artificial Sequence: Synthetic primer
cccgtccaagtagtgctcatt

SEQ ID NO: 18183 - DNA, 27 bp, Artificial Sequence
  Description of Artificial Sequence: Synthetic primer
tctcttaatcatcatcgtcatcctcca

SEQ ID NO: 18184 - DNA, 27 bp, Artificial Sequence
  Description of Artificial Sequence: Synthetic primer
tctcaccatctctctatcaacatgaca

SEQ ID NO: 18185 - DNA, 21 bp, Artificial Sequence
  Description of Artificial Sequence: Synthetic primer
gaaacctcacaagggcgtgat

SEQ ID NO: 18186 - DNA, 22 bp, Artificial Sequence
  Description of Artificial Sequence: Synthetic primer
gctttctgcaccctgtataagc

SEQ ID NO: 18187 - DNA, 21 bp, Artificial Sequence
  Description of Artificial Sequence: Synthetic primer
ccgccatagttagcaccgtag

SEQ ID NO: 18188 - DNA, 21 bp, Artificial Sequence
  Description of Artificial Sequence: Synthetic primer
ggtctctcgctcattgcttca

SEQ ID NO: 18189 - DNA, 23 bp, Artificial Sequence
  Description of Artificial Sequence: Synthetic primer
acgcaggcaaagattatgatcag

SEQ ID NO: 18190 - DNA, 23 bp, Artificial Sequence
  Description of Artificial Sequence: Synthetic primer
gaaagagagcggtcagtactgag

SEQ ID NO: 18191 - DNA, 25 bp, Artificial Sequence
  Description of Artificial Sequence: Synthetic primer
acgagaaggttttccttttgctaga

SEQ ID NO: 18192 - DNA, 23 bp, Artificial Sequence
  Description of Artificial Sequence: Synthetic primer
gctcctccacatcatcttcagtg

SEQ ID NO: 18193 - DNA, 21 bp, Artificial Sequence
  Description of Artificial Sequence: Synthetic primer
agcgaaggcgccctacatata

SEQ ID NO: 18194 - DNA, 22 bp, Artificial Sequence
  Description of Artificial Sequence: Synthetic primer
acgacgcccccatctatttatg

SEQ ID NO: 18195 - DNA, 21 bp, Artificial Sequence
  Description of Artificial Sequence: Synthetic primer
ttgcgggattgttggtcatca

SEQ ID NO: 18196 - DNA, 24 bp, Artificial Sequence
  Description of Artificial Sequence: Synthetic primer
gccgctctttttcaacaaactgta

SEQ ID NO: 18197 - DNA, 22 bp, Artificial Sequence
  Description of Artificial Sequence: Synthetic primer
ggtcatcattcttggcacttcc

SEQ ID NO: 18198 - DNA, 28 bp, Artificial Sequence
  Description of Artificial Sequence: Synthetic primer
tcaacataagctattaagcatccatggt

SEQ ID NO: 18199 - DNA, 24 bp, Artificial Sequence
  Description of Artificial Sequence: Synthetic primer
cccttatatctactgggagctgga

SEQ ID NO: 18200 - DNA, 19 bp, Artificial Sequence
  Description of Artificial Sequence: Synthetic primer
ccttcaggcacctctgctc

SEQ ID NO: 18201 - DNA, 21 bp, Artificial Sequence
  Description of Artificial Sequence: Synthetic primer
cctcccacctatttgggatca

SEQ ID NO: 18202 - DNA, 24 bp, Artificial Sequence
  Description of Artificial Sequence: Synthetic primer
gcatacagcacaatctgaaggatg

SEQ ID NO: 18203 - DNA, 24 bp, Artificial Sequence
  Description of Artificial Sequence: Synthetic primer
aggacctatcctccttgaggacta

SEQ ID NO: 18204 - DNA, 21 bp, Artificial Sequence
  Description of Artificial Sequence: Synthetic primer
tgcttcgatggacaaacgtgt

SEQ ID NO: 18205 - DNA, 23 bp, Artificial Sequence
  Description of Artificial Sequence: Synthetic primer
actgagcgctcataaagtagcat

SEQ ID NO: 18206 - DNA, 25 bp, Artificial Sequence
  Description of Artificial Sequence: Synthetic primer
aaaggctaaaccaaacgatgatagc

SEQ ID NO: 18207 - DNA, 21 bp, Artificial Sequence
  Description of Artificial Sequence: Synthetic primer
acagattcccctcgtcatcgt

SEQ ID NO: 18208 - DNA, 27 bp, Artificial Sequence
  Description of Artificial Sequence: Synthetic primer
gaaacagatcaaggacaccactaagaa

SEQ ID NO: 18209 - DNA, 25 bp, Artificial Sequence
  Description of Artificial Sequence: Synthetic primer
tggtgtcatgtaattggtttccaga

SEQ ID NO: 18210 - DNA, 21 bp, Artificial Sequence
  Description of Artificial Sequence: Synthetic primer
agcttgggacagtagatgcac

SEQ ID NO: 18211 - DNA, 25 bp, Artificial Sequence
  Description of Artificial Sequence: Synthetic primer
tggattatctgaccccaaggtatct

SEQ ID NO: 18212 - DNA, 21 bp, Artificial Sequence
  Description of Artificial Sequence: Synthetic primer
ctcacacactcagtccagcac

SEQ ID NO: 18213 - DNA, 21 bp, Artificial Sequence
  Description of Artificial Sequence: Synthetic primer
gatggtccgtcgaagctgtat

SEQ ID NO: 18214 - DNA, 24 bp, Artificial Sequence
  Description of Artificial Sequence: Synthetic primer
taaacccttcgagaaacgagcttg

SEQ ID NO: 18215 - DNA, 19 bp, Artificial Sequence
  Description of Artificial Sequence: Synthetic primer
acgagtatcagcggcaggt

SEQ ID NO: 18216 - DNA, 28 bp, Artificial Sequence
  Description of Artificial Sequence: Synthetic primer
aaatcatgtctggtattggaaaacacaa

SEQ ID NO: 18217 - DNA, 27 bp, Artificial Sequence
  Description of Artificial Sequence: Synthetic primer
tcaggataacagttctttggatccatc

SEQ ID NO: 18218 - DNA, 22 bp, Artificial Sequence
  Description of Artificial Sequence: Synthetic primer
gtgatgggcaattggcaaatct

SEQ ID NO: 18219 - DNA, 21 bp, Artificial Sequence
  Description of Artificial Sequence: Synthetic primer
ccaatttaccgtccgcgagat

SEQ ID NO: 18220 - DNA, 22 bp, Artificial Sequence
  Description of Artificial Sequence: Synthetic primer
cgggcgaaatagtgcgttattc

SEQ ID NO: 18221 - DNA, 21 bp, Artificial Sequence
  Description of Artificial Sequence: Synthetic primer
cagtacacgtattcccgctgt

SEQ ID NO: 18222 - DNA, 28 bp, Artificial Sequence
  Description of Artificial Sequence: Synthetic primer
gcagcaatatagcaacattaaagcatct

SEQ ID NO: 18223 - DNA, 26 bp, Artificial Sequence
  Description of Artificial Sequence: Synthetic primer
gaatttaacatgctttccacctccag

SEQ ID NO: 18224 - DNA, 27 bp, Artificial Sequence
  Description of Artificial Sequence: Synthetic primer
atgcttgatgttgccttctcaatatcc

SEQ ID NO: 18225 - DNA, 23 bp, Artificial Sequence
  Description of Artificial Sequence: Synthetic primer
tgctggttctgatagttctgagc

SEQ ID NO: 18226 - DNA, 23 bp, Artificial Sequence
  Description of Artificial Sequence: Synthetic primer
agaccgtccgatctatgagagag

SEQ ID NO: 18227 - DNA, 23 bp, Artificial Sequence
  Description of Artificial Sequence: Synthetic primer
cctattggcagtgaagtgaaagc

SEQ ID NO: 18228 - DNA, 24 bp, Artificial Sequence
  Description of Artificial Sequence: Synthetic primer
accaacaaattgaaagaaggcgtt

SEQ ID NO: 18229 - DNA, 27 bp, Artificial Sequence
  Description of Artificial Sequence: Synthetic primer
gcttggacttcttatccagatatctca

SEQ ID NO: 18230 - DNA, 22 bp, Artificial Sequence
  Description of Artificial Sequence: Synthetic primer
cacaacgtcctctaccttcaca

SEQ ID NO: 18231 - DNA, 19 bp, Artificial Sequence
  Description of Artificial Sequence: Synthetic primer
gtaggcatggacgctggtg

SEQ ID NO: 18232 - DNA, 23 bp, Artificial Sequence
  Description of Artificial Sequence: Synthetic primer
actgctactattgatggccactg

SEQ ID NO: 18233 - DNA, 21 bp, Artificial Sequence
  Description of Artificial Sequence: Synthetic primer
tgagacctccaacttggacga

SEQ ID NO: 18234 - DNA, 26 bp, Artificial Sequence
  Description of Artificial Sequence: Synthetic primer
caccaatcaacatatcttgacaccca

SEQ ID NO: 18235 - DNA, 19 bp, Artificial Sequence
  Description of Artificial Sequence: Synthetic primer
cgctttgcaacccagctag

SEQ ID NO: 18236 - DNA, 20 bp, Artificial Sequence
  Description of Artificial Sequence: Synthetic primer
gcatgcccctggaggtcata

SEQ ID NO: 18237 - DNA, 21 bp, Artificial Sequence
  Description of Artificial Sequence: Synthetic primer
caacgcaatgacagactctcc

SEQ ID NO: 18238 - DNA, 21 bp, Artificial Sequence
  Description of Artificial Sequence: Synthetic primer
gccctgtagaacctcttagcg

SEQ ID NO: 18239 - DNA, 27 bp, Artificial Sequence
  Description of Artificial Sequence: Synthetic primer
aggcgatcttaaactgaagttttcaca

SEQ ID NO: 18240 - DNA, 21 bp, Artificial Sequence
  Description of Artificial Sequence: Synthetic primer
cgtgcaaggtgcagatcttgt

SEQ ID NO: 18241 - DNA, 26 bp, Artificial Sequence
  Description of Artificial Sequence: Synthetic primer
ggaaagaggttgattttcgtgttcag

SEQ ID NO: 18242 - DNA, 18 bp, Artificial Sequence
  Description of Artificial Sequence: Synthetic primer
acgtcggtgaacatctgc

SEQ ID NO: 18243 - DNA, 22 bp, Artificial Sequence
  Description of Artificial Sequence: Synthetic primer
gttgatggttatcaggccctca

SEQ ID NO: 18244 - DNA, 28 bp, Artificial Sequence
  Description of Artificial Sequence: Synthetic primer
ccgaatgtatgttcctttagagcatgta

SEQ ID NO: 18245 - DNA, 21 bp, Artificial Sequence
  Description of Artificial Sequence: Synthetic primer
gttgtgagcactatgcttgcg

SEQ ID NO: 18246 - DNA, 26 bp, Artificial Sequence
  Description of Artificial Sequence: Synthetic primer
ttggagtgcaataattcagtgttcag

SEQ ID NO: 18247 - DNA, 18 bp, Artificial Sequence
  Description of Artificial Sequence: Synthetic primer
gtctcagaatgccggcaa

SEQ ID NO: 18248 - DNA, 23 bp, Artificial Sequence
  Description of Artificial Sequence: Synthetic primer
cgacaccttcaatcagtttctcg

SEQ ID NO: 18249 - DNA, 26 bp, Artificial Sequence
  Description of Artificial Sequence: Synthetic primer
aaacacaccttagagcacatctcttg

SEQ ID NO: 18250 - DNA, 21 bp, Artificial Sequence
  Description of Artificial Sequence: Synthetic primer
cttgaccgtgagatgattcgc

SEQ ID NO: 18251 - DNA, 22 bp, Artificial Sequence
  Description of Artificial Sequence: Synthetic primer
acaactcacgagaaccactcaa

SEQ ID NO: 18252 - DNA, 21 bp, Artificial Sequence
  Description of Artificial Sequence: Synthetic primer
tgcaaggcctagcatttcaga

SEQ ID NO: 18253 - DNA, 21 bp, Artificial Sequence
  Description of Artificial Sequence: Synthetic primer
aactccgaaggagcaaactcg

SEQ ID NO: 18254 - DNA, 22 bp, Artificial Sequence
  Description of Artificial Sequence: Synthetic primer
gtgccttggcatgcagactata

SEQ ID NO: 18255 - DNA, 22 bp, Artificial Sequence
  Description of Artificial Sequence: Synthetic primer
cctgttcgaccccacataagat

SEQ ID NO: 18256 - DNA, 21 bp, Artificial Sequence
  Description of Artificial Sequence: Synthetic primer
ttgatggtgggagtccagaac

SEQ ID NO: 18257 - DNA, 20 bp, Artificial Sequence
  Description of Artificial Sequence: Synthetic primer
gcgaatctttgccctggttc

SEQ ID NO: 18258 - DNA, 27 bp, Artificial Sequence
  Description of Artificial Sequence: Synthetic primer
agattgcatcatcaactaaccctaagt

SEQ ID NO: 18259 - DNA, 22 bp, Artificial Sequence
  Description of Artificial Sequence: Synthetic primer
tgacaactgagcgactgaatca

SEQ ID NO: 18260 - DNA, 26 bp, Artificial Sequence
  Description of Artificial Sequence: Synthetic primer
tgtgttgtgttcttacttcttaggca

SEQ ID NO: 18261 - DNA, 23 bp, Artificial Sequence
  Description of Artificial Sequence: Synthetic primer
gtacactctgcaactcaacaacc

SEQ ID NO: 18262 - DNA, 23 bp, Artificial Sequence
  Description of Artificial Sequence: Synthetic primer
tctcgtggagaagtacacaccta

SEQ ID NO: 18263 - DNA, 21 bp, Artificial Sequence
  Description of Artificial Sequence: Synthetic primer
agggatacggtggagaagctc

SEQ ID NO: 18264 - DNA, 28 bp, Artificial Sequence
  Description of Artificial Sequence: Synthetic primer
tggtagcatgtaagacgatgatatcatg

SEQ ID NO: 18265 - DNA, 21 bp, Artificial Sequence
  Description of Artificial Sequence: Synthetic primer
catgagccaagatggtgaggt

SEQ ID NO: 18266 - DNA, 21 bp, Artificial Sequence
  Description of Artificial Sequence: Synthetic primer
gaggaccgtcacctacgattt

SEQ ID NO: 18267 - DNA, 22 bp, Artificial Sequence
  Description of Artificial Sequence: Synthetic primer
cgaggtgggagtcgatcttgta

SEQ ID NO: 18268 - DNA, 22 bp, Artificial Sequence
  Description of Artificial Sequence: Synthetic primer
tgtagtcagctctgtactgcca

SEQ ID NO: 18269 - DNA, 21 bp, Artificial Sequence
  Description of Artificial Sequence: Synthetic primer
agtgtcgccaccatttccttt

SEQ ID NO: 18270 - DNA, 21 bp, Artificial Sequence
  Description of Artificial Sequence: Synthetic primer
agacgtccaaggcttgacaaa

SEQ ID NO: 18271 - DNA, 27 bp, Artificial Sequence
  Description of Artificial Sequence: Synthetic primer
tgtaaggtatctcatcggtatcagatc

SEQ ID NO: 18272 - DNA, 28 bp, Artificial Sequence
  Description of Artificial Sequence: Synthetic primer
cttgggatccagtaaaactttctggtta

SEQ ID NO: 18273 - DNA, 20 bp, Artificial Sequence
  Description of Artificial Sequence: Synthetic primer
gcaggtccaccttggtagtc

SEQ ID NO: 18274 - DNA, 20 bp, Artificial Sequence
  Description of Artificial Sequence: Synthetic primer
acccagcagctcagatcttc

SEQ ID NO: 18275 - DNA, 21 bp, Artificial Sequence
  Description of Artificial Sequence: Synthetic primer
gccatgtgtttggcaagttct

SEQ ID NO: 18276 - DNA, 21 bp, Artificial Sequence
  Description of Artificial Sequence: Synthetic primer
cctcactgagacaaccaagga

SEQ ID NO: 18277 - DNA, 28 bp, Artificial Sequence
  Description of Artificial Sequence: Synthetic primer
acaactttggatttccccttatctactg

SEQ ID NO: 18278 - DNA, 23 bp, Artificial Sequence
  Description of Artificial Sequence: Synthetic primer
gacaaggaggaacataacggtga

SEQ ID NO: 18279 - DNA, 28 bp, Artificial Sequence
  Description of Artificial Sequence: Synthetic primer
agatgaatttgttaagaagcatggtgtg

SEQ ID NO: 18280 - DNA, 23 bp, Artificial Sequence
  Description of Artificial Sequence: Synthetic primer
cgagttgccattatgtaccacct

SEQ ID NO: 18281 - DNA, 23 bp, Artificial Sequence
  Description of Artificial Sequence: Synthetic primer
tcgtggtggttgagttatcgatc

SEQ ID NO: 18282 - DNA, 22 bp, Artificial Sequence
  Description of Artificial Sequence: Synthetic primer
tctctggtgaagccgttgtatg

SEQ ID NO: 18283 - DNA, 27 bp, Artificial Sequence
  Description of Artificial Sequence: Synthetic primer
agaaaggtcttctttggaatcttttgc

SEQ ID NO: 18284 - DNA, 19 bp, Artificial Sequence
  Description of Artificial Sequence: Synthetic primer
ggcggtgtagttcctccag

SEQ ID NO: 18285 - DNA, 29 bp, Artificial Sequence
  Description of Artificial Sequence: Synthetic primer
gggatctaataatgatgatcagggtgatg

SEQ ID NO: 18286 - DNA, 20 bp, Artificial Sequence
  Description of Artificial Sequence: Synthetic primer
cgtgtaccagtgcaggaagg

SEQ ID NO: 18287 - DNA, 18 bp, Artificial Sequence
  Description of Artificial Sequence: Synthetic primer
caagtgctgcagcctcct

SEQ ID NO: 18288 - DNA, 21 bp, Artificial Sequence
  Description of Artificial Sequence: Synthetic primer
cgagggagagagatcgagtga

SEQ ID NO: 18289 - DNA, 21 bp, Artificial Sequence
  Description of Artificial Sequence: Synthetic primer
ggcctcaggacggatctattt

SEQ ID NO: 18290 - DNA, 27 bp, Artificial Sequence
  Description of Artificial Sequence: Synthetic primer
atccatagccctcatacaaaacagaat

SEQ ID NO: 18291 - DNA, 28 bp, Artificial Sequence
  Description of Artificial Sequence: Synthetic primer
gcaaattgatctacaatggtgtttcagg

SEQ ID NO: 18292 - DNA, 26 bp, Artificial Sequence
  Description of Artificial Sequence: Synthetic primer
acttgcaccattataagaaccgtctt

SEQ ID NO: 18293 - DNA, 21 bp, Artificial Sequence
  Description of Artificial Sequence: Synthetic primer
aaaagcatgggaccactctca

SEQ ID NO: 18294 - DNA, 27 bp, Artificial Sequence
  Description of Artificial Sequence: Synthetic primer
gatggttgtctggattcttgtcaaaag

SEQ ID NO: 18295 - DNA, 23 bp, Artificial Sequence
  Description of Artificial Sequence: Synthetic primer
gcacacccacacatacactagaa

SEQ ID NO: 18296 - DNA, 21 bp, Artificial Sequence
  Description of Artificial Sequence: Synthetic primer
agtgacaaactcaagcgagca

SEQ ID NO: 18297 - DNA, 23 bp, Artificial Sequence
  Description of Artificial Sequence: Synthetic primer
tgatcatatttcttggccccgtt

SEQ ID NO: 18298 - DNA, 24 bp, Artificial Sequence
  Description of Artificial Sequence: Synthetic primer
acattgatggattcctttgcactc

SEQ ID NO: 18299 - DNA, 21 bp, Artificial Sequence
  Description of Artificial Sequence: Synthetic primer
cgtgcaagtgtaatgcagcac

SEQ ID NO: 18300 - DNA, 21 bp, Artificial Sequence
  Description of Artificial Sequence: Synthetic primer
cgacaacaaagtgcgagtcct

SEQ ID NO: 18301 - DNA, 25 bp, Artificial Sequence
  Description of Artificial Sequence: Synthetic primer
acagcataaattaaacaggcaggga

SEQ ID NO: 18302 - DNA, 21 bp, Artificial Sequence
  Description of Artificial Sequence: Synthetic primer
tttgcttgggcttctatgcga

SEQ ID NO: 18303 - DNA, 25 bp, Artificial Sequence
  Description of Artificial Sequence: Synthetic primer
ggtgtaagttttgccaaattcccaa

SEQ ID NO: 18304 - DNA, 29 bp, Artificial Sequence
  Description of Artificial Sequence: Synthetic primer
tgattgaatccactaatggtgtctgtaaa

SEQ ID NO: 18305 - DNA, 22 bp, Artificial Sequence
  Description of Artificial Sequence: Synthetic primer
cagcatcttctcaactggcatg

SEQ ID NO: 18306 - DNA, 23 bp, Artificial Sequence
  Description of Artificial Sequence: Synthetic primer
gataaaccagagacacctttcgc

SEQ ID NO: 18307 - DNA, 19 bp, Artificial Sequence
  Description of Artificial Sequence: Synthetic primer
agtcggttccgtagtgctg

SEQ ID NO: 18308 - DNA, 21 bp, Artificial Sequence
  Description of Artificial Sequence: Synthetic primer
tggacttcatcgccctaggtt

SEQ ID NO: 18309 - DNA, 28 bp, Artificial Sequence
  Description of Artificial Sequence: Synthetic primer
gttgcttgtcatcttctatcaaatctgt

SEQ ID NO: 18310 - DNA, 24 bp, Artificial Sequence
  Description of Artificial Sequence: Synthetic primer
gcgtatatccactcaccagacatg

SEQ ID NO: 18311 - DNA, 25 bp, Artificial Sequence
  Description of Artificial Sequence: Synthetic primer
tcaagagttctgccaagcataatca

SEQ ID NO: 18312 - DNA, 19 bp, Artificial Sequence
  Description of Artificial Sequence: Synthetic primer
aagcttgcctacggtgtcg

SEQ ID NO: 18313 - DNA, 26 bp, Artificial Sequence
  Description of Artificial Sequence: Synthetic primer
acagacaaaatctttgtagcatgctt

SEQ ID NO: 18314 - DNA, 28 bp, Artificial Sequence
  Description of Artificial Sequence: Synthetic primer
accaaagttaccttaggaaacaaaatcc

SEQ ID NO: 18315 - DNA, 21 bp, Artificial Sequence
  Description of Artificial Sequence: Synthetic primer
gttgtccgggatccatccttc

SEQ ID NO: 18316 - DNA, 29 bp, Artificial Sequence
  Description of Artificial Sequence: Synthetic primer
ggtactatataatagacacggcaacgaaa

SEQ ID NO: 18317 - DNA, 21 bp, Artificial Sequence
  Description of Artificial Sequence: Synthetic primer
agatcgcaacctccaattccc

SEQ ID NO: 18318 - DNA, 19 bp, Artificial Sequence
  Description of Artificial Sequence: Synthetic primer
tcctggagttgctgcgttc

SEQ ID NO: 18319 - DNA, 23 bp, Artificial Sequence
  Description of Artificial Sequence: Synthetic primer
tgcatttgcatcaacaccttcaa

SEQ ID NO: 18320 - DNA, 27 bp, Artificial Sequence
  Description of Artificial Sequence: Synthetic primer
tcaggcaacagtttacatcaaactaca

SEQ ID NO: 18321 - DNA, 27 bp, Artificial Sequence
  Description of Artificial Sequence: Synthetic primer
tgctacacaaaagcaatgctattcatt

SEQ ID NO: 18322 - DNA, 18 bp, Artificial Sequence
  Description of Artificial Sequence: Synthetic primer
cggagggagtaggtgcca

SEQ ID NO: 18323 - DNA, 21 bp, Artificial Sequence
  Description of Artificial Sequence: Synthetic primer
cgcgtcccttgcttatcaaat

SEQ ID NO: 18324 - DNA, 24 bp, Artificial Sequence
  Description of Artificial Sequence: Synthetic primer
ctgtgattttgattctgggactgg

SEQ ID NO: 18325 - DNA, 21 bp, Artificial Sequence
  Description of Artificial Sequence: Synthetic primer
ctacttgctggctggtggatt

SEQ ID NO: 18326 - DNA, 21 bp, Artificial Sequence
  Description of Artificial Sequence: Synthetic primer
tgctgcccagttttagtgcat

SEQ ID NO: 18327 - DNA, 23 bp, Artificial Sequence
  Description of Artificial Sequence: Synthetic primer
ctggaggacaaagagatccaagc

SEQ ID NO: 18328 - DNA, 27 bp, Artificial Sequence
  Description of Artificial Sequence: Synthetic primer
tgtgtcaaatttcagagttaagactgc

SEQ ID NO: 18329 - DNA, 21 bp, Artificial Sequence
  Description of Artificial Sequence: Synthetic primer
tggcaaacctgccaatgttct

SEQ ID NO: 18330 - DNA, 19 bp, Artificial Sequence
  Description of Artificial Sequence: Synthetic primer
caccacatgcttcccatcg

SEQ ID NO: 18331 - DNA, 21 bp, Artificial Sequence
  Description of Artificial Sequence: Synthetic primer
ctgtcaccaaaccttggccta

SEQ ID NO: 18332 - DNA, 22 bp, Artificial Sequence
  Description of Artificial Sequence: Synthetic primer
aggcatctcactggagagtttg

SEQ ID NO: 18333 - DNA, 26 bp, Artificial Sequence
  Description of Artificial Sequence: Synthetic primer
tggtctgccatatcaaagaacagaat

SEQ ID NO: 18334 - DNA, 24 bp, Artificial Sequence
  Description of Artificial Sequence: Synthetic primer
atggagaaactcaagaagcagcag

SEQ ID NO: 18335 - DNA, 18 bp, Artificial Sequence
  Description of Artificial Sequence: Synthetic primer
gtgctcacgcacccttcc

SEQ ID NO: 18336 - DNA, 21 bp, Artificial Sequence
  Description of Artificial Sequence: Synthetic primer
gacggctgcattaagcaactc

SEQ ID NO: 18337 - DNA, 21 bp, Artificial Sequence
  Description of Artificial Sequence: Synthetic primer
ggtggctgctctacttgtagg

SEQ ID NO: 18338 - DNA, 27 bp, Artificial Sequence
  Description of Artificial Sequence: Synthetic primer
gcactgtatgtgatgtgttgtgataaa

SEQ ID NO: 18339 - DNA, 19 bp, Artificial Sequence
  Description of Artificial Sequence: Synthetic primer
ccggactccgtcaccaatg

SEQ ID NO: 18340 - DNA, 19 bp, Artificial Sequence
  Description of Artificial Sequence: Synthetic primer
gggatcactctggtgcttg

SEQ ID NO: 18341 - DNA, 28 bp, Artificial Sequence
  Description of Artificial Sequence: Synthetic primer
ccgatctctaggaatatatcacttgcat

SEQ ID NO: 18342 - DNA, 28 bp, Artificial Sequence
  Description of Artificial Sequence: Synthetic primer
acattagcattagcattgcccttatttt

SEQ ID NO: 18343 - DNA, 23 bp, Artificial Sequence
  Description of Artificial Sequence: Synthetic primer
agttcttccagccgcaattaatc

SEQ ID NO: 18344 - DNA, 23 bp, Artificial Sequence
  Description of Artificial Sequence: Synthetic primer
gttgatcatgaaccccatacagc

SEQ ID NO: 18345 - DNA, 28 bp, Artificial Sequence
  Description of Artificial Sequence: Synthetic primer
gcctgatttatttagctctatagcctgt

SEQ ID NO: 18346 - DNA, 21 bp, Artificial Sequence
  Description of Artificial Sequence: Synthetic primer
gggaacgactcgatttcgtca

SEQ ID NO: 18347 - DNA, 22 bp, Artificial Sequence
  Description of Artificial Sequence: Synthetic primer
tgaaaccaaatcaggtgaggct

SEQ ID NO: 18348 - DNA, 28 bp, Artificial Sequence
  Description of Artificial Sequence: Synthetic primer
ttacagaagtgataaggtacaagtgacg

SEQ ID NO: 18349 - DNA, 22 bp, Artificial Sequence
  Description of Artificial Sequence: Synthetic primer
gcggctgtggaaatacttttca

SEQ ID NO: 18350 - DNA, 23 bp, Artificial Sequence
  Description of Artificial Sequence: Synthetic primer
cttcaggcagacgtctatgactc

SEQ ID NO: 18351 - DNA, 21 bp, Artificial Sequence
  Description of Artificial Sequence: Synthetic primer
gccagccatccaaagatgttc

SEQ ID NO: 18352 - DNA, 25 bp, Artificial Sequence
  Description of Artificial Sequence: Synthetic primer
tcatcagacgagtaaaccttgagtc

SEQ ID NO: 18353 - DNA, 28 bp, Artificial Sequence
  Description of Artificial Sequence: Synthetic primer
ggacttgcttgtttatttcattgaacag

SEQ ID NO: 18354 - DNA, 23 bp, Artificial Sequence
  Description of Artificial Sequence: Synthetic primer
gtccagcctttgttttctacgtg

SEQ ID NO: 18355 - DNA, 21 bp, Artificial Sequence
  Description of Artificial Sequence: Synthetic primer
cgatccagcattccacgctta

SEQ ID NO: 18356 - DNA, 21 bp, Artificial Sequence
  Description of Artificial Sequence: Synthetic primer
cgaagggcagtgagtactcag

SEQ ID NO: 18357 - DNA, 21 bp, Artificial Sequence
  Description of Artificial Sequence: Synthetic primer
gtatgtcgaacgccatgaacc

SEQ ID NO: 18358 - DNA, 25 bp, Artificial Sequence
  Description of Artificial Sequence: Synthetic primer
ggcactatttgccagataacagttc

SEQ ID NO: 18359 - DNA, 25 bp, Artificial Sequence
  Description of Artificial Sequence: Synthetic primer
tcttgcaggtctctttatgagcttt

SEQ ID NO: 18360 - DNA, 24 bp, Artificial Sequence
  Description of Artificial Sequence: Synthetic primer
aaacatgtggttgtcgtaacacaa

SEQ ID NO: 18361 - DNA, 24 bp, Artificial Sequence
  Description of Artificial Sequence: Synthetic primer
cgaactggactaaggaacatcagc

SEQ ID NO: 18362 - DNA, 28 bp, Artificial Sequence
  Description of Artificial Sequence: Synthetic primer
ccagttgtctgtaacaattggtatcatg

SEQ ID NO: 18363 - DNA, 26 bp, Artificial Sequence
  Description of Artificial Sequence: Synthetic primer
tgttcttgtgtaaccttttgatcagc

SEQ ID NO: 18364 - DNA, 22 bp, Artificial Sequence
  Description of Artificial Sequence: Synthetic primer
gggatgcatggcagcgaatata

SEQ ID NO: 18365 - DNA, 21 bp, Artificial Sequence
  Description of Artificial Sequence: Synthetic primer
ctgcagctctggaaagcaaga

SEQ ID NO: 18366 - DNA, 23 bp, Artificial Sequence
  Description of Artificial Sequence: Synthetic primer
catcagtcacgggaacagaaaga

SEQ ID NO: 18367 - DNA, 23 bp, Artificial Sequence
  Description of Artificial Sequence: Synthetic primer
cagttttgcaacagctccaagaa

SEQ ID NO: 18368 - DNA, 22 bp, Artificial Sequence
  Description of Artificial Sequence: Synthetic primer
ggatgcactgtgttaagccatc

SEQ ID NO: 18369 - DNA, 21 bp, Artificial Sequence
  Description of Artificial Sequence: Synthetic primer
ttagtctccacggctttcctg

SEQ ID NO: 18370 - DNA, 21 bp, Artificial Sequence
  Description of Artificial Sequence: Synthetic primer
cctgctcgcacacaacaaatt

SEQ ID NO: 18371 - DNA, 26 bp, Artificial Sequence
  Description of Artificial Sequence: Synthetic primer
gctctttaccaatatgttctctggct

SEQ ID NO: 18372 - DNA, 27 bp, Artificial Sequence
  Description of Artificial Sequence: Synthetic primer
ggctactccatatccagctaaatcttg

SEQ ID NO: 18373 - DNA, 21 bp, Artificial Sequence
  Description of Artificial Sequence: Synthetic primer
ggagtgttgctggcttcagtt

SEQ ID NO: 18374 - DNA, 23 bp, Artificial Sequence
  Description of Artificial Sequence: Synthetic primer
caagtacagcaaaagcatgctca

SEQ ID NO: 18375 - DNA, 28 bp, Artificial Sequence
  Description of Artificial Sequence: Synthetic primer
tccctctgtctcaaaataaatgtctcag

SEQ ID NO: 18376 - DNA, 24 bp, Artificial Sequence
  Description of Artificial Sequence: Synthetic primer
gtaacacatgtttctccactgagc

SEQ ID NO: 18377 - DNA, 21 bp, Artificial Sequence
  Description of Artificial Sequence: Synthetic primer
ccaagagacgcagcttcagtt

SEQ ID NO: 18378 - DNA, 28 bp, Artificial Sequence
  Description of Artificial Sequence: Synthetic primer
aacactgcatttctttttatttcacacc

SEQ ID NO: 18379 - DNA, 23 bp, Artificial Sequence
  Description of Artificial Sequence: Synthetic primer
tggaagggacaagaatgaagtcg

SEQ ID NO: 18380 - DNA, 22 bp, Artificial Sequence
  Description of Artificial Sequence: Synthetic primer
gccaaagcatttccttcaccac

SEQ ID NO: 18381 - DNA, 21 bp, Artificial Sequence
  Description of Artificial Sequence: Synthetic primer
cagcgctagctggaattcttc

SEQ ID NO: 18382 - DNA, 22 bp, Artificial Sequence
  Description of Artificial Sequence: Synthetic primer
tcaagagccaaagctttggttg

SEQ ID NO: 18383 - DNA, 22 bp, Artificial Sequence
  Description of Artificial Sequence: Synthetic primer
ggctggtgttgacaaaagaaca

SEQ ID NO: 18384 - DNA, 23 bp, Artificial Sequence
  Description of Artificial Sequence: Synthetic primer
gggcgatgatgaaaaatctgacc

SEQ ID NO: 18385 - DNA, 22 bp, Artificial Sequence
  Description of Artificial Sequence: Synthetic primer
gacactttggagatgtctggca

SEQ ID NO: 18386 - DNA, 21 bp, Artificial Sequence
  Description of Artificial Sequence: Synthetic primer
gttggtcgtggttatcatggc

SEQ ID NO: 18387 - DNA, 22 bp, Artificial Sequence
  Description of Artificial Sequence: Synthetic primer
tttgggtaccccaacaagagaa

SEQ ID NO: 18388 - DNA, 23 bp, Artificial Sequence
  Description of Artificial Sequence: Synthetic primer
cagcagagccagggttatctaat

SEQ ID NO: 18389 - DNA, 28 bp, Artificial Sequence
  Description of Artificial Sequence: Synthetic primer
tttgatctctcaagctcacttttcttca

SEQ ID NO: 18390 - DNA, 18 bp, Artificial Sequence
  Description of Artificial Sequence: Synthetic primer
gattgctgccctggcagt

SEQ ID NO: 18391 - DNA, 22 bp, Artificial Sequence
  Description of Artificial Sequence: Synthetic primer
acacacccctctcttagctacc

SEQ ID NO: 18392 - DNA, 27 bp, Artificial Sequence
  Description of Artificial Sequence: Synthetic primer
ggtggcttcttatccatttagagaagt

SEQ ID NO: 18393 - DNA, 26 bp, Artificial Sequence
  Description of Artificial Sequence: Synthetic primer
gttagtaccagttccattaacatggg

SEQ ID NO: 18394 - DNA, 21 bp, Artificial Sequence
  Description of Artificial Sequence: Synthetic primer
tacttcgtgttggccttctgg

SEQ ID NO: 18395 - DNA, 21 bp, Artificial Sequence
  Description of Artificial Sequence: Synthetic primer
ttcctgccatgatggaacacg

SEQ ID NO: 18396 - DNA, 27 bp, Artificial Sequence
  Description of Artificial Sequence: Synthetic primer
gctataactactccccatgggtcaata

SEQ ID NO: 18397 - DNA, 21 bp, Artificial Sequence
  Description of Artificial Sequence: Synthetic primer
ccaactcaatccgtccagtgc

SEQ ID NO: 18398 - DNA, 30 bp, Artificial Sequence
  Description of Artificial Sequence: Synthetic primer
accatacgtttcaaaattgataccaacatt

SEQ ID NO: 18399 - DNA, 24 bp, Artificial Sequence
  Description of Artificial Sequence: Synthetic primer
ggaaaggataaagaagggctgttg

SEQ ID NO: 18400 - DNA, 24 bp, Artificial Sequence
  Description of Artificial Sequence: Synthetic primer
cagtcatctcttgtgcttttgtcg

SEQ ID NO: 18401 - DNA, 30 bp, Artificial Sequence
  Description of Artificial Sequence: Synthetic primer
atcttcaattgttatgcacttcatgttttt

SEQ ID NO: 18402 - DNA, 22 bp, Artificial Sequence
  Description of Artificial Sequence: Synthetic primer
actcactgctggaagacagtca

SEQ ID NO: 18403 - DNA, 26 bp, Artificial Sequence
  Description of Artificial Sequence: Synthetic primer
cccctcaaccagatcagaaacatatt

SEQ ID NO: 18404 - DNA, 26 bp, Artificial Sequence
  Description of Artificial Sequence: Synthetic primer
agtaccaatggaggagacatgttaga

SEQ ID NO: 18405 - DNA, 21 bp, Artificial Sequence
  Description of Artificial Sequence: Synthetic primer
gccacgagttcaaaagactcc

SEQ ID NO: 18406 - DNA, 21 bp, Artificial Sequence
  Description of Artificial Sequence: Synthetic primer
tcttttgcccaacttgagcac

SEQ ID NO: 18407 - DNA, 28 bp, Artificial Sequence
  Description of Artificial Sequence: Synthetic primer
atgaaatcatttgtcagaatgctcatgt

SEQ ID NO: 18408 - DNA, 21 bp, Artificial Sequence
  Description of Artificial Sequence: Synthetic primer
ttgacggtcgtgtcaggaatc

SEQ ID NO: 18409 - DNA, 21 bp, Artificial Sequence
  Description of Artificial Sequence: Synthetic primer
gaggtaactcctgctgccatg

SEQ ID NO: 18410 - DNA, 19 bp, Artificial Sequence
  Description of Artificial Sequence: Synthetic primer
gacacaacctccgccatct

SEQ ID NO: 18411 - DNA, 19 bp, Artificial Sequence
  Description of Artificial Sequence: Synthetic primer
ctgtcgcctgctctctctc

SEQ ID NO: 18412 - DNA, 21 bp, Artificial Sequence
  Description of Artificial Sequence: Synthetic primer
agggaaatcgacctcgtgttc

SEQ ID NO: 18413 - DNA, 29 bp, Artificial Sequence
  Description of Artificial Sequence: Synthetic primer
ttctttctgttatccataaccaggtactt

SEQ ID NO: 18414 - DNA, 23 bp, Artificial Sequence
  Description of Artificial Sequence: Synthetic primer
gccttggttacttcttcaacagc

SEQ ID NO: 18415 - DNA, 26 bp, Artificial Sequence
  Description of Artificial Sequence: Synthetic primer
ggtatctaggactgaatgaatgccaa

SEQ ID NO: 18416 - DNA, 21 bp, Artificial Sequence
  Description of Artificial Sequence: Synthetic primer
gagtgggacctgccatttgat

SEQ ID NO: 18417 - DNA, 27 bp, Artificial Sequence
  Description of Artificial Sequence: Synthetic primer
gatcttcatccctaatagctcatggag

SEQ ID NO: 18418 - DNA, 25 bp, Artificial Sequence
  Description of Artificial Sequence: Synthetic primer
acaaaaccggactgaaaagcttagt

SEQ ID NO: 18419 - DNA, 30 bp, Artificial Sequence
  Description of Artificial Sequence: Synthetic primer
tttttggctggattttatcattagcacatt

SEQ ID NO: 18420 - DNA, 21 bp, Artificial Sequence
  Description of Artificial Sequence: Synthetic primer
gggaatgtggaggcaatcttg

SEQ ID NO: 18421 - DNA, 28 bp, Artificial Sequence
  Description of Artificial Sequence: Synthetic primer
gtgaatttcctttttcatccatgtgtca

SEQ ID NO: 18422 - DNA, 21 bp, Artificial Sequence
  Description of Artificial Sequence: Synthetic primer
gttccaaggcgtgcattttca

SEQ ID NO: 18423 - DNA, 23 bp, Artificial Sequence
  Description of Artificial Sequence: Synthetic primer
acttgaccacgaaacaagttcag

SEQ ID NO: 18424 - DNA, 27 bp, Artificial Sequence
  Description of Artificial Sequence: Synthetic primer
ttcaatcacacactcagtcgaaaatac

SEQ ID NO: 18425 - DNA, 24 bp, Artificial Sequence
  Description of Artificial Sequence: Synthetic primer
acagaacttgagggcttcagattt

SEQ ID NO: 18426 - DNA, 21 bp, Artificial Sequence
  Description of Artificial Sequence: Synthetic primer
agagcttaccagcaggctttt

SEQ ID NO: 18427 - DNA, 22 bp, Artificial Sequence
  Description of Artificial Sequence: Synthetic primer
gcatcctcatgaacgatgaacc

SEQ ID NO: 18428 - DNA, 24 bp, Artificial Sequence
  Description of Artificial Sequence: Synthetic primer
aactctatgggtaagaatgcgcaa

SEQ ID NO: 18429 - DNA, 21 bp, Artificial Sequence
  Description of Artificial Sequence: Synthetic primer
ttacatggcgaagagccaaga

SEQ ID NO: 18430 - DNA, 23 bp, Artificial Sequence
  Description of Artificial Sequence: Synthetic primer
ccaaaccctgaagtcttgatgga

SEQ ID NO: 18431 - DNA, 21 bp, Artificial Sequence
  Description of Artificial Sequence: Synthetic primer
aactcaagttcacgccacaac

SEQ ID NO: 18432 - DNA, 21 bp, Artificial Sequence
  Description of Artificial Sequence: Synthetic primer
gggaagctcgttattgcttgc

SEQ ID NO: 18433 - DNA, 19 bp, Artificial Sequence
  Description of Artificial Sequence: Synthetic primer
gaacccgatcacgctgtcc

SEQ ID NO: 18434 - DNA, 26 bp, Artificial Sequence
  Description of Artificial Sequence: Synthetic primer
aacaggctttgacaagatgattacag

SEQ ID NO: 18435 - DNA, 18 bp, Artificial Sequence
  Description of Artificial Sequence: Synthetic primer
ggcccccttcaccattca

SEQ ID NO: 18436 - DNA, 23 bp, Artificial Sequence
  Description of Artificial Sequence: Synthetic primer
ccctcctcatcatgggaatcaga

SEQ ID NO: 18437 - DNA, 21 bp, Artificial Sequence
  Description of Artificial Sequence: Synthetic primer
cttgacgatctcccggccata

SEQ ID NO: 18438 - DNA, 28 bp, Artificial Sequence
  Description of Artificial Sequence: Synthetic primer
ttcttgttcatacaggaactcatcttga

SEQ ID NO: 18439 - DNA, 28 bp, Artificial Sequence
  Description of Artificial Sequence: Synthetic primer
tgaaaatacaagatggcatctgattgtt

SEQ ID NO: 18440 - DNA, 23 bp, Artificial Sequence
  Description of Artificial Sequence: Synthetic primer
tcctgtaatggactactctgctg

SEQ ID NO: 18441 - DNA, 21 bp, Artificial Sequence
  Description of Artificial Sequence: Synthetic primer
ctctacaccggacagtcgttg

SEQ ID NO: 18442 - DNA, 21 bp, Artificial Sequence
  Description of Artificial Sequence: Synthetic primer
ggtctctgaatccggtcgaac

SEQ ID NO: 18443 - DNA, 27 bp, Artificial Sequence
  Description of Artificial Sequence: Synthetic primer
tctaactgagatatctgacacgtcgaa

SEQ ID NO: 18444 - DNA, 21 bp, Artificial Sequence
  Description of Artificial Sequence: Synthetic primer
cccagcttcgttccaccaata

SEQ ID NO: 18445 - DNA, 26 bp, Artificial Sequence
  Description of Artificial Sequence: Synthetic primer
accagagacaatcgaaactacttgat

SEQ ID NO: 18446 - DNA, 22 bp, Artificial Sequence
  Description of Artificial Sequence: Synthetic primer
gcggtcttaatgaatgcctcct

SEQ ID NO: 18447 - DNA, 18 bp, Artificial Sequence
  Description of Artificial Sequence: Synthetic primer
gcagccttcagctcatcc

SEQ ID NO: 18448 - DNA, 21 bp, Artificial Sequence
  Description of Artificial Sequence: Synthetic primer
agcttggatacacgcttctgc

SEQ ID NO: 18449 - DNA, 28 bp, Artificial Sequence
  Description of Artificial Sequence: Synthetic primer
gcaacaaagaatagaatctctgggtctt

SEQ ID NO: 18450 - DNA, 23 bp, Artificial Sequence
  Description of Artificial Sequence: Synthetic primer
ttccagtcagctcagcaaaattc

SEQ ID NO: 18451 - DNA, 25 bp, Artificial Sequence
  Description of Artificial Sequence: Synthetic primer
tcttacacaaaagcgagttaggaga

SEQ ID NO: 18452 - DNA, 22 bp, Artificial Sequence
  Description of Artificial Sequence: Synthetic primer
aaaggttcaccggagtttctct

SEQ ID NO: 18453 - DNA, 21 bp, Artificial Sequence
  Description of Artificial Sequence: Synthetic primer
taactgcatcgccacaacctc

SEQ ID NO: 18454 - DNA, 18 bp, Artificial Sequence
  Description of Artificial Sequence: Synthetic primer
tgcactcgttcggtgtcg

SEQ ID NO: 18455 - DNA, 27 bp, Artificial Sequence
  Description of Artificial Sequence: Synthetic primer
caggagatatgcctgaaatcataccat

SEQ ID NO: 18456 - DNA, 21 bp, Artificial Sequence
  Description of Artificial Sequence: Synthetic primer
ttgctactagcaccggtagtg

SEQ ID NO: 18457 - DNA, 20 bp, Artificial Sequence
  Description of Artificial Sequence: Synthetic primer
ccccacccttctttcccaag

SEQ ID NO: 18458 - DNA, 30 bp, Artificial Sequence
  Description of Artificial Sequence: Synthetic primer
tgaagcaacaaattaaactagtcttgcaaa

SEQ ID NO: 18459 - DNA, 26 bp, Artificial Sequence
  Description of Artificial Sequence: Synthetic primer
catcacttactcttgttcgacaacac

SEQ ID NO: 18460 - DNA, 21 bp, Artificial Sequence
  Description of Artificial Sequence: Synthetic primer
ctggccgttcctcgttcttaa

SEQ ID NO: 18461 - DNA, 21 bp, Artificial Sequence
  Description of Artificial Sequence: Synthetic primer
gaaaggcctggatactgccat

SEQ ID NO: 18462 - DNA, 25 bp, Artificial Sequence
  Description of Artificial Sequence: Synthetic primer
catttatcagtgtcccacggaaaga

SEQ ID NO: 18463 - DNA, 27 bp, Artificial Sequence
  Description of Artificial Sequence: Synthetic primer
cgtatccactttccagagtttctgatt

SEQ ID NO: 18464 - DNA, 25 bp, Artificial Sequence
  Description of Artificial Sequence: Synthetic primer
acatgaaccgcacaatcagttatac

SEQ ID NO: 18465 - DNA, 21 bp, Artificial Sequence
  Description of Artificial Sequence: Synthetic primer
ttgaccaggtcatcgaaacga

SEQ ID NO: 18466 - DNA, 22 bp, Artificial Sequence
  Description of Artificial Sequence: Synthetic primer
aactcctgaccttttgccttcc

SEQ ID NO: 18467 - DNA, 23 bp, Artificial Sequence
  Description of Artificial Sequence: Synthetic primer
cggatagtacaccacaagtccat

SEQ ID NO: 18468 - DNA, 27 bp, Artificial Sequence
  Description of Artificial Sequence: Synthetic primer
ctggctacattacattacacatttccc

SEQ ID NO: 18469 - DNA, 20 bp, Artificial Sequence
  Description of Artificial Sequence: Synthetic primer
ttcaccctggagctcgaaga

SEQ ID NO: 18470 - DNA, 24 bp, Artificial Sequence
  Description of Artificial Sequence: Synthetic primer
tgagagcaatgctcgtagattgaa

SEQ ID NO: 18471 - DNA, 21 bp, Artificial Sequence
  Description of Artificial Sequence: Synthetic primer
gagaagagctgctttgctgac

SEQ ID NO: 18472 - DNA, 19 bp, Artificial Sequence
  Description of Artificial Sequence: Synthetic primer
ccccattcggaccatggaa

SEQ ID NO: 18473 - DNA, 28 bp, Artificial Sequence
  Description of Artificial Sequence: Synthetic primer
tgtataaggtgcaagttacaacacaaac

SEQ ID NO: 18474 - DNA, 23 bp, Artificial Sequence
  Description of Artificial Sequence: Synthetic primer
cagtatgaactccccagggatct

SEQ ID NO: 18475 - DNA, 22 bp, Artificial Sequence
  Description of Artificial Sequence: Synthetic primer
tcagtttgctcctcaacacctt

SEQ ID NO: 18476 - DNA, 21 bp, Artificial Sequence
  Description of Artificial Sequence: Synthetic primer
gccgagttaatgcatcatgcg

SEQ ID NO: 18477 - DNA, 21 bp, Artificial Sequence
  Description of Artificial Sequence: Synthetic primer
accctaaattcagaggcagca

SEQ ID NO: 18478 - DNA, 21 bp, Artificial Sequence
  Description of Artificial Sequence: Synthetic primer
cctgtgcagaacacttcatcg

SEQ ID NO: 18479 - DNA, 25 bp, Artificial Sequence
  Description of Artificial Sequence: Synthetic primer
cttaagtgctgaaaggaaacctgac

SEQ ID NO: 18480 - DNA, 28 bp, Artificial Sequence
  Description of Artificial Sequence: Synthetic primer
agcaactgaactgtactgtacataacaa

SEQ ID NO: 18481 - DNA, 21 bp, Artificial Sequence
  Description of Artificial Sequence: Synthetic primer
cacctgaagcactatcccaca

SEQ ID NO: 18482 - DNA, 25 bp, Artificial Sequence
  Description of Artificial Sequence: Synthetic primer
ccatctatctctggaatggtatcgg

SEQ ID NO: 18483 - DNA, 21 bp, Artificial Sequence
  Description of Artificial Sequence: Synthetic primer
atctcgctttttcggagctca

SEQ ID NO: 18484 - DNA, 18 bp, Artificial Sequence
  Description of Artificial Sequence: Synthetic primer
gctgtgcgtcgtgctcta

SEQ ID NO: 18485 - DNA, 25 bp, Artificial Sequence
  Description of Artificial Sequence: Synthetic primer
cgagctcattgacaaaacattgctc

SEQ ID NO: 18486 - DNA, 24 bp, Artificial Sequence
  Description of Artificial Sequence: Synthetic primer
ccaggaacaacaacaattccagtg

SEQ ID NO: 18487 - DNA, 23 bp, Artificial Sequence
  Description of Artificial Sequence: Synthetic primer
gcagacagaacatgagcaacatg

SEQ ID NO: 18488 - DNA, 20 bp, Artificial Sequence
  Description of Artificial Sequence: Synthetic primer
tgctagccaggagcaatcaa

SEQ ID NO: 18489 - DNA, 24 bp, Artificial Sequence
  Description of Artificial Sequence: Synthetic primer
cccttcatacatgagattccgcat

SEQ ID NO: 18490 - DNA, 25 bp, Artificial Sequence
  Description of Artificial Sequence: Synthetic primer
tgactgcatcatatacaacaggtga

SEQ ID NO: 18491 - DNA, 21 bp, Artificial Sequence
  Description of Artificial Sequence: Synthetic primer
ggaaggtgttgacgatgatgc

SEQ ID NO: 18492 - DNA, 21 bp, Artificial Sequence
  Description of Artificial Sequence: Synthetic primer
ctgatgggttctcctccaggt

SEQ ID NO: 18493 - DNA, 23 bp, Artificial Sequence
  Description of Artificial Sequence: Synthetic primer
cagaagcgcaactacaagttgaa

SEQ ID NO: 18494 - DNA, 22 bp, Artificial Sequence
  Description of Artificial Sequence: Synthetic primer
gttgtggttgcagatcgatgac

SEQ ID NO: 18495 - DNA, 21 bp, Artificial Sequence
  Description of Artificial Sequence: Synthetic primer
gctccaaactcctccttgctc

SEQ ID NO: 18496 - DNA, 24 bp, Artificial Sequence
  Description of Artificial Sequence: Synthetic primer
gtttcgcttgtacattgaggagag

SEQ ID NO: 18497 - DNA, 22 bp, Artificial Sequence
  Description of Artificial Sequence: Synthetic primer
ccacggcaatatctcccaatca

SEQ ID NO: 18498 - DNA, 27 bp, Artificial Sequence
  Description of Artificial Sequence: Synthetic primer
catagtagctatgagtacccgtagact

SEQ ID NO: 18499 - DNA, 21 bp, Artificial Sequence
  Description of Artificial Sequence: Synthetic primer
actgcaacctgccattcagag

SEQ ID NO: 18500 - DNA, 21 bp, Artificial Sequence
  Description of Artificial Sequence: Synthetic primer
caggaagggaagctgatcgtt

SEQ ID NO: 18501 - DNA, 24 bp, Artificial Sequence
  Description of Artificial Sequence: Synthetic primer
cacaaggagactcttttgagcatt

SEQ ID NO: 18502 - DNA, 21 bp, Artificial Sequence
  Description of Artificial Sequence: Synthetic primer
ggtcaatctcagaccaacgca

SEQ ID NO: 18503 - DNA, 21 bp, Artificial Sequence
  Description of Artificial Sequence: Synthetic primer
tgtggaacagcttccctgttg

SEQ ID NO: 18504 - DNA, 19 bp, Artificial Sequence
  Description of Artificial Sequence: Synthetic primer
tctgtggtgccagcttctt

SEQ ID NO: 18505 - DNA, 24 bp, Artificial Sequence
  Description of Artificial Sequence: Synthetic primer
agagaatcctgccgaattggaaaa

SEQ ID NO: 18506 - DNA, 21 bp, Artificial Sequence
  Description of Artificial Sequence: Synthetic primer
ttgtctcaaccaccgtgtagg

SEQ ID NO: 18507 - DNA, 21 bp, Artificial Sequence
  Description of Artificial Sequence: Synthetic primer
tctcaattctcaggcgagggt

SEQ ID NO: 18508 - DNA, 21 bp, Artificial Sequence
  Description of Artificial Sequence: Synthetic primer
ttgaggatatcgtccgtgcag

SEQ ID NO: 18509 - DNA, 20 bp, Artificial Sequence
  Description of Artificial Sequence: Synthetic primer
cgttctgcgtcttctccaca

SEQ ID NO: 18510 - DNA, 25 bp, Artificial Sequence
  Description of Artificial Sequence: Synthetic primer
gacaattttgcggaaatcaaccatc

SEQ ID NO: 18511 - DNA, 21 bp, Artificial Sequence
  Description of Artificial Sequence: Synthetic primer
cctcatcaaagcatgcctcca

SEQ ID NO: 18512 - DNA, 21 bp, Artificial Sequence
  Description of Artificial Sequence: Synthetic primer
cctccctgccaaagttcatcc

SEQ ID NO: 18513 - DNA, 22 bp, Artificial Sequence
  Description of Artificial Sequence: Synthetic primer
gcttctttaatcgcctcttggg

SEQ ID NO: 18514 - DNA, 19 bp, Artificial Sequence
  Description of Artificial Sequence: Synthetic primer
gtgcttctgggacgtcctc

SEQ ID NO: 18515 - DNA, 24 bp, Artificial Sequence
  Description of Artificial Sequence: Synthetic primer
tgaatttcgatactccctccaacc

SEQ ID NO: 18516 - DNA, 27 bp, Artificial Sequence
  Description of Artificial Sequence: Synthetic primer
tttttattactatcttggcgacgcaaa

SEQ ID NO: 18517 - DNA, 25 bp, Artificial Sequence
  Description of Artificial Sequence: Synthetic primer
tcgttcgtttacacatttagtcgga

SEQ ID NO: 18518 - DNA, 20 bp, Artificial Sequence
  Description of Artificial Sequence: Synthetic primer
tctccagcccagctctttca

SEQ ID NO: 18519 - DNA, 26 bp, Artificial Sequence
  Description of Artificial Sequence: Synthetic primer
gaactataatcttctgtcggcacaca

SEQ ID NO: 18520 - DNA, 26 bp, Artificial Sequence
  Description of Artificial Sequence: Synthetic primer
caagcaaccaggagaatatcatcaga

SEQ ID NO: 18521 - DNA, 21 bp, Artificial Sequence
  Description of Artificial Sequence: Synthetic primer
aatcttgctgctgctggtcat

SEQ ID NO: 18522 - DNA, 25 bp, Artificial Sequence
  Description of Artificial Sequence: Synthetic primer
aattcctaccatttccttgtcctga

SEQ ID NO: 18523 - DNA, 19 bp, Artificial Sequence
  Description of Artificial Sequence: Synthetic primer
tcctaacctcgcccctcct

SEQ ID NO: 18524 - DNA, 27 bp, Artificial Sequence
  Description of Artificial Sequence: Synthetic primer
ggtgatcgaaacagtatatctctggga

SEQ ID NO: 18525 - DNA, 22 bp, Artificial Sequence
  Description of Artificial Sequence: Synthetic primer
ctgctcatttttgtgcccacat

SEQ ID NO: 18526 - DNA, 24 bp, Artificial Sequence
  Description of Artificial Sequence: Synthetic primer
tgggtgttgtcttgctcaattaca

SEQ ID NO: 18527 - DNA, 23 bp, Artificial Sequence
  Description of Artificial Sequence: Synthetic primer
ggctctgctagtgtttgggtaat

SEQ ID NO: 18528 - DNA, 26 bp, Artificial Sequence
  Description of Artificial Sequence: Synthetic primer
ttttgggctaagataagagtccttca

SEQ ID NO: 18529 - DNA, 29 bp, Artificial Sequence
  Description of Artificial Sequence: Synthetic primer
tgtagaattaaaatggaagacatcgtcgt

SEQ ID NO: 18530 - DNA, 27 bp, Artificial Sequence
  Description of Artificial Sequence: Synthetic primer
tggatcatcagtcttggtacatcatac

SEQ ID NO: 18531 - DNA, 21 bp, Artificial Sequence
  Description of Artificial Sequence: Synthetic primer
gagtgtcatcttctccgctca

SEQ ID NO: 18532 - DNA, 21 bp, Artificial Sequence
  Description of Artificial Sequence: Synthetic primer
gatcgagcagacagctatcgc

SEQ ID NO: 18533 - DNA, 23 bp, Artificial Sequence
  Description of Artificial Sequence: Synthetic primer
ttttaacgggtaagaggtccgaa

SEQ ID NO: 18534 - DNA, 21 bp, Artificial Sequence
  Description of Artificial Sequence: Synthetic primer
ttgctcctctcaggacaatgg

SEQ ID NO: 18535 - DNA, 21 bp, Artificial Sequence
  Description of Artificial Sequence: Synthetic primer
tgagttcagttggtgcaggtc

SEQ ID NO: 18536 - DNA, 27 bp, Artificial Sequence
  Description of Artificial Sequence: Synthetic primer
aagagatacaacaggattgatcagacc

SEQ ID NO: 18537 - DNA, 23 bp, Artificial Sequence
  Description of Artificial Sequence: Synthetic primer
catgtgcatctcaaagcccatac

SEQ ID NO: 18538 - DNA, 24 bp, Artificial Sequence
  Description of Artificial Sequence: Synthetic primer
aacaaaaaccatgtacggtcactg

SEQ ID NO: 18539 - DNA, 21 bp, Artificial Sequence
  Description of Artificial Sequence: Synthetic primer
catcggcgatggagaatctgg

SEQ ID NO: 18540 - DNA, 21 bp, Artificial Sequence
  Description of Artificial Sequence: Synthetic primer
ttcccgtctgcgaagatgttg

SEQ ID NO: 18541 - DNA, 18 bp, Artificial Sequence
  Description of Artificial Sequence: Synthetic primer
ttgagcacgtcgcggaac

SEQ ID NO: 18542 - DNA, 26 bp, Artificial Sequence
  Description of Artificial Sequence: Synthetic primer
gccttgacaaattcttctaagtggtc

SEQ ID NO: 18543 - DNA, 27 bp, Artificial Sequence
  Description of Artificial Sequence: Synthetic primer
cttatccaaacaaccacttgaagtacc

SEQ ID NO: 18544 - DNA, 21 bp, Artificial Sequence
  Description of Artificial Sequence: Synthetic primer
accaaaattccatgcccaggt

SEQ ID NO: 18545 - DNA, 25 bp, Artificial Sequence
  Description of Artificial Sequence: Synthetic primer
gttgtcaatgagaaggatgtcacct

SEQ ID NO: 18546 - DNA, 21 bp, Artificial Sequence
  Description of Artificial Sequence: Synthetic primer
ctctttcatcgttgccttgcg

SEQ ID NO: 18547 - DNA, 25 bp, Artificial Sequence
  Description of Artificial Sequence: Synthetic primer
actaatgcagaaaatggagcagtct

SEQ ID NO: 18548 - DNA, 20 bp, Artificial Sequence
  Description of Artificial Sequence: Synthetic primer
aacgagatggcgatggacag

SEQ ID NO: 18549 - DNA, 21 bp, Artificial Sequence
  Description of Artificial Sequence: Synthetic primer
ggaggttgaagattggccgaa

SEQ ID NO: 18550 - DNA, 21 bp, Artificial Sequence
  Description of Artificial Sequence: Synthetic primer
ttctcctggactctgggtctg

SEQ ID NO: 18551 - DNA, 21 bp, Artificial Sequence
  Description of Artificial Sequence: Synthetic primer
gtatgcgtacacgtccctgtt

SEQ ID NO: 18552 - DNA, 24 bp, Artificial Sequence
  Description of Artificial Sequence: Synthetic primer
tttaacttcaagcccaacgaactg

SEQ ID NO: 18553 - DNA, 23 bp, Artificial Sequence
  Description of Artificial Sequence: Synthetic primer
atcaccgttttccaacaacacac

SEQ ID NO: 18554 - DNA, 21 bp, Artificial Sequence
  Description of Artificial Sequence: Synthetic primer
ccaggatcagcaagagtgctt

SEQ ID NO: 18555 - DNA, 29 bp, Artificial Sequence
  Description of Artificial Sequence: Synthetic primer
ctccaagacactactaaataccagatctc

SEQ ID NO: 18556 - DNA, 22 bp, Artificial Sequence
  Description of Artificial Sequence: Synthetic primer
ctcattcctggttgctttggac

SEQ ID NO: 18557 - DNA, 28 bp, Artificial Sequence
  Description of Artificial Sequence: Synthetic primer
aatcgataatctcgactaggcagataag

SEQ ID NO: 18558 - DNA, 21 bp, Artificial Sequence
  Description of Artificial Sequence: Synthetic primer
atctaggcattttggccaagc

SEQ ID NO: 18559 - DNA, 27 bp, Artificial Sequence
  Description of Artificial Sequence: Synthetic primer
tgtcctgtggtttttggagaatctaaa

SEQ ID NO: 18560 - DNA, 23 bp, Artificial Sequence
  Description of Artificial Sequence: Synthetic primer
ttcctgctccgggctatatagaa

SEQ ID NO: 18561 - DNA, 21 bp, Artificial Sequence
  Description of Artificial Sequence: Synthetic primer
taaaccactctgccagagacg

SEQ ID NO: 18562 - DNA, 25 bp, Artificial Sequence
  Description of Artificial Sequence: Synthetic primer
agtcaccacggtacacaaatttttc

SEQ ID NO: 18563 - DNA, 21 bp, Artificial Sequence
  Description of Artificial Sequence: Synthetic primer
cagctcccaaaggactatccc

SEQ ID NO: 18564 - DNA, 26 bp, Artificial Sequence
  Description of Artificial Sequence: Synthetic primer
cgtatcctggaggttttccatattcg

SEQ ID NO: 18565 - DNA, 21 bp, Artificial Sequence
  Description of Artificial Sequence: Synthetic primer
caggtggcaacgggataagag

SEQ ID NO: 18566 - DNA, 21 bp, Artificial Sequence
  Description of Artificial Sequence: Synthetic primer
gcagggaagcaatccatcctc

SEQ ID NO: 18567 - DNA, 24 bp, Artificial Sequence
  Description of Artificial Sequence: Synthetic primer
cccaaaattggctatgacaatgct

SEQ ID NO: 18568 - DNA, 22 bp, Artificial Sequence
  Description of Artificial Sequence: Synthetic primer
cagtggctggttgttttgatga

SEQ ID NO: 18569 - DNA, 24 bp, Artificial Sequence
  Description of Artificial Sequence: Synthetic primer
aatggtacagatcttccacacgag

SEQ ID NO: 18570 - DNA, 24 bp, Artificial Sequence
  Description of Artificial Sequence: Synthetic primer
tgtcaacaacgagaagatcgagtt

SEQ ID NO: 18571 - DNA, 18 bp, Artificial Sequence
  Description of Artificial Sequence: Synthetic primer
gaccttgctcacctccgt

SEQ ID NO: 18572 - DNA, 28 bp, Artificial Sequence
  Description of Artificial Sequence: Synthetic primer
aagaatgtaataacaatcaggacagagg

SEQ ID NO: 18573 - DNA, 25 bp, Artificial Sequence
  Description of Artificial Sequence: Synthetic primer
ccaagaaagaagaagcatcgttctc

SEQ ID NO: 18574 - DNA, 28 bp, Artificial Sequence
  Description of Artificial Sequence: Synthetic primer
tgagaaaaaccaacatgacagaaaatgt

SEQ ID NO: 18575 - DNA, 21 bp, Artificial Sequence
  Description of Artificial Sequence: Synthetic primer
ctacactcacaagctccgtct

SEQ ID NO: 18576 - DNA, 21 bp, Artificial Sequence
  Description of Artificial Sequence: Synthetic primer
tccgtcatcggtcctgaagta

SEQ ID NO: 18577 - DNA, 21 bp, Artificial Sequence
  Description of Artificial Sequence: Synthetic primer
tatcatccaccaagtcacgca

SEQ ID NO: 18578 - DNA, 21 bp, Artificial Sequence
  Description of Artificial Sequence: Synthetic primer
catcagcgaagacctgactcc

SEQ ID NO: 18579 - DNA, 21 bp, Artificial Sequence
  Description of Artificial Sequence: Synthetic primer
ttctgcctcagctagaccaag

SEQ ID NO: 18580 - DNA, 20 bp, Artificial Sequence
  Description of Artificial Sequence: Synthetic primer
gggcaaggtttggtgctatg

SEQ ID NO: 18581 - DNA, 22 bp, Artificial Sequence
  Description of Artificial Sequence: Synthetic primer
cggctgtttgcttggaagtaac

SEQ ID NO: 18582 - DNA, 23 bp, Artificial Sequence
  Description of Artificial Sequence: Synthetic primer
cacctttgaacttttggtttggc

SEQ ID NO: 18583 - DNA, 25 bp, Artificial Sequence
  Description of Artificial Sequence: Synthetic primer
gtagtctaacaagtgctcaggtgac

SEQ ID NO: 18584 - DNA, 27 bp, Artificial Sequence
  Description of Artificial Sequence: Synthetic primer
agtatacgagtctgacagtttattggg

SEQ ID NO: 18585 - DNA, 30 bp, Artificial Sequence
  Description of Artificial Sequence: Synthetic primer
gtttcctaacatttccttctcaattgatct

SEQ ID NO: 18586 - DNA, 20 bp, Artificial Sequence
  Description of Artificial Sequence: Synthetic primer
gacagcatgtgtccgtagca

SEQ ID NO: 18587 - DNA, 26 bp, Artificial Sequence
  Description of Artificial Sequence: Synthetic primer
tcagaatcatgcatgccaatttgtac

SEQ ID NO: 18588 - DNA, 24 bp, Artificial Sequence
  Description of Artificial Sequence: Synthetic primer
gccagtattgtaccctcgagaaaa

SEQ ID NO: 18589 - DNA, 23 bp, Artificial Sequence
  Description of Artificial Sequence: Synthetic primer
atgtcaactgctccttcttcctc

SEQ ID NO: 18590 - DNA, 25 bp, Artificial Sequence
  Description of Artificial Sequence: Synthetic primer
aaaaccatcctgtacttccttcctc

SEQ ID NO: 18591 - DNA, 21 bp, Artificial Sequence
  Description of Artificial Sequence: Synthetic primer
cagcagccaagccaattgtag

SEQ ID NO: 18592 - DNA, 24 bp, Artificial Sequence
  Description of Artificial Sequence: Synthetic primer
tgacaggtagttaccataggcatg

SEQ ID NO: 18593 - DNA, 24 bp, Artificial Sequence
  Description of Artificial Sequence: Synthetic primer
acatgtgaaccaggagagaatcac

SEQ ID NO: 18594 - DNA, 21 bp, Artificial Sequence
  Description of Artificial Sequence: Synthetic primer
agagatgcgagagagcgtttg

SEQ ID NO: 18595 - DNA, 21 bp, Artificial Sequence
  Description of Artificial Sequence: Synthetic primer
tccgctcaaaacgtagcagat

SEQ ID NO: 18596 - DNA, 24 bp, Artificial Sequence
  Description of Artificial Sequence: Synthetic primer
gcaaaagccgagctatctcatttc

SEQ ID NO: 18597 - DNA, 24 bp, Artificial Sequence
  Description of Artificial Sequence: Synthetic primer
gtaatcaccaaactcagcctgaac

SEQ ID NO: 18598 - DNA, 21 bp, Artificial Sequence
  Description of Artificial Sequence: Synthetic primer
cagcagcccatggaatactca

SEQ ID NO: 18599 - DNA, 19 bp, Artificial Sequence
  Description of Artificial Sequence: Synthetic primer
gttgaaggcggtgcagtct

SEQ ID NO: 18600 - DNA, 28 bp, Artificial Sequence
  Description of Artificial Sequence: Synthetic primer
actggtgaaaaatggagtcagatagttc

SEQ ID NO: 18601 - DNA, 21 bp, Artificial Sequence
  Description of Artificial Sequence: Synthetic primer
tgcccaactcaactgatgcag

SEQ ID NO: 18602 - DNA, 26 bp, Artificial Sequence
  Description of Artificial Sequence: Synthetic primer
acataaatcctcttcttgatgccctt

SEQ ID NO: 18603 - DNA, 21 bp, Artificial Sequence
  Description of Artificial Sequence: Synthetic primer
atcccagctacaggcatatcg

SEQ ID NO: 18604 - DNA, 23 bp, Artificial Sequence
  Description of Artificial Sequence: Synthetic primer
tgcacaggtggaatcaaactaca

SEQ ID NO: 18605 - DNA, 22 bp, Artificial Sequence
  Description of Artificial Sequence: Synthetic primer
tgcactttcattatcgcagcca

SEQ ID NO: 18606 - DNA, 21 bp, Artificial Sequence
  Description of Artificial Sequence: Synthetic primer
atcttgggcttccaggaacac

SEQ ID NO: 18607 - DNA, 21 bp, Artificial Sequence
  Description of Artificial Sequence: Synthetic primer
cccaaacgaccagtgattgtc

SEQ ID NO: 18608 - DNA, 22 bp, Artificial Sequence
  Description of Artificial Sequence: Synthetic primer
ctagatcatccaggtcgctgtc

SEQ ID NO: 18609 - DNA, 21 bp, Artificial Sequence
  Description of Artificial Sequence: Synthetic primer
gtccacctcctcggtcttgta

SEQ ID NO: 18610 - DNA, 19 bp, Artificial Sequence
  Description of Artificial Sequence: Synthetic primer
cagcacgtcctcccagttc

SEQ ID NO: 18611 - DNA, 20 bp, Artificial Sequence
  Description of Artificial Sequence: Synthetic primer
catgtggttcagctgggact

SEQ ID NO: 18612 - DNA, 21 bp, Artificial Sequence
  Description of Artificial Sequence: Synthetic primer
agatccgatgataggctcggt

SEQ ID NO: 18613 - DNA, 27 bp, Artificial Sequence
  Description of Artificial Sequence: Synthetic primer
aatagcacttctgtaagagggtaactg

SEQ ID NO: 18614 - DNA, 18 bp, Artificial Sequence
  Description of Artificial Sequence: Synthetic primer
gcgagcgtgtccgacatg

SEQ ID NO: 18615 - DNA, 21 bp, Artificial Sequence
  Description of Artificial Sequence: Synthetic primer
tatgacactgcctccgtccat

SEQ ID NO: 18616 - DNA, 25 bp, Artificial Sequence
  Description of Artificial Sequence: Synthetic primer
aacagaggtagtaagtatgggcaca

SEQ ID NO: 18617 - DNA, 28 bp, Artificial Sequence
  Description of Artificial Sequence: Synthetic primer
agtgtattctctacagacagacaaagtc

SEQ ID NO: 18618 - DNA, 25 bp, Artificial Sequence
  Description of Artificial Sequence: Synthetic primer
cttcactaatgtgctgaggattcca

SEQ ID NO: 18619 - DNA, 21 bp, Artificial Sequence
  Description of Artificial Sequence: Synthetic primer
cccaaaacagctcgaagttcc

SEQ ID NO: 18620 - DNA, 19 bp, Artificial Sequence
  Description of Artificial Sequence: Synthetic primer
cacctgctcccatgttcgt

SEQ ID NO: 18621 - DNA, 21 bp, Artificial Sequence
  Description of Artificial Sequence: Synthetic primer
aacttcgccacctacatttgc

SEQ ID NO: 18622 - DNA, 25 bp, Artificial Sequence
  Description of Artificial Sequence: Synthetic primer
cctctcatcatttaaggtggtcaca

SEQ ID NO: 18623 - DNA, 25 bp, Artificial Sequence
  Description of Artificial Sequence: Synthetic primer
gcaacttgaacatttccagcttctc

SEQ ID NO: 18624 - DNA, 22 bp, Artificial Sequence
  Description of Artificial Sequence: Synthetic primer
agttacaacgcctcccatgaaa

SEQ ID NO: 18625 - DNA, 30 bp, Artificial Sequence
  Description of Artificial Sequence: Synthetic primer
caatatgaatcaaacaactgtatcagcatc

SEQ ID NO: 18626 - DNA, 23 bp, Artificial Sequence
  Description of Artificial Sequence: Synthetic primer
tcaaattcttcgcccatacagca

SEQ ID NO: 18627 - DNA, 19 bp, Artificial Sequence
  Description of Artificial Sequence: Synthetic primer
ccgtgtcctcgtcgataca

SEQ ID NO: 18628 - DNA, 23 bp, Artificial Sequence
  Description of Artificial Sequence: Synthetic primer
gagttccaatggcttttctgtcc

SEQ ID NO: 18629 - DNA, 21 bp, Artificial Sequence
  Description of Artificial Sequence: Synthetic primer
ggcagcactcttgggaattga

SEQ ID NO: 18630 - DNA, 22 bp, Artificial Sequence
  Description of Artificial Sequence: Synthetic primer
ctctctactatgcgcggttttg

SEQ ID NO: 18631 - DNA, 22 bp, Artificial Sequence
  Description of Artificial Sequence: Synthetic primer
acgttgtccatgcagtttagag

SEQ ID NO: 18632 - DNA, 27 bp, Artificial Sequence
  Description of Artificial Sequence: Synthetic primer
acttacagtacaggtttacacatcgtt

SEQ ID NO: 18633 - DNA, 25 bp, Artificial Sequence
  Description of Artificial Sequence: Synthetic primer
cactgtaatagctcttgctcaaagg

SEQ ID NO: 18634 - DNA, 23 bp, Artificial Sequence
  Description of Artificial Sequence: Synthetic primer
tgcaaactacatgaacaggcatg

SEQ ID NO: 18635 - DNA, 21 bp, Artificial Sequence
  Description of Artificial Sequence: Synthetic primer
caactgttctgctgagtgcca

SEQ ID NO: 18636 - DNA, 26 bp, Artificial Sequence
  Description of Artificial Sequence: Synthetic primer
tccaggtctggtaggaaaattttacc

SEQ ID NO: 18637 - DNA, 26 bp, Artificial Sequence
  Description of Artificial Sequence: Synthetic primer
ttgtatctgtctttcgttgtgtagga

SEQ ID NO: 18638 - DNA, 21 bp, Artificial Sequence
  Description of Artificial Sequence: Synthetic primer
tgtccatcgtcacgttctacg

SEQ ID NO: 18639 - DNA, 29 bp, Artificial Sequence
  Description of Artificial Sequence: Synthetic primer
tttaattacaagcagagcttcaatcatcg

SEQ ID NO: 18640 - DNA, 23 bp, Artificial Sequence
  Description of Artificial Sequence: Synthetic primer
ctgcatctggttctgttttctcc

SEQ ID NO: 18641 - DNA, 23 bp, Artificial Sequence
  Description of Artificial Sequence: Synthetic primer
gcctctattgcatctgacaaacc

SEQ ID NO: 18642 - DNA, 25 bp, Artificial Sequence
  Description of Artificial Sequence: Synthetic primer
acaaacacaagcacatatcctcctc

SEQ ID NO: 18643 - DNA, 22 bp, Artificial Sequence
  Description of Artificial Sequence: Synthetic primer
ttacagtcggatgggttccttc

SEQ ID NO: 18644 - DNA, 28 bp, Artificial Sequence
  Description of Artificial Sequence: Synthetic primer
tgtcgacgttacaaaaattatctcagga

SEQ ID NO: 18645 - DNA, 21 bp, Artificial Sequence
  Description of Artificial Sequence: Synthetic primer
gcccatcatctcgtagtacgc

SEQ ID NO: 18646 - DNA, 23 bp, Artificial Sequence
  Description of Artificial Sequence: Synthetic primer
tgaagcagacgagttttgcaatg

SEQ ID NO: 18647 - DNA, 21 bp, Artificial Sequence
  Description of Artificial Sequence: Synthetic primer
attcccatccttctcgtcgtc

SEQ ID NO: 18648 - DNA, 24 bp, Artificial Sequence
  Description of Artificial Sequence: Synthetic primer
ccagcattgtaaagttgctctgaa

SEQ ID NO: 18649 - DNA, 26 bp, Artificial Sequence
  Description of Artificial Sequence: Synthetic primer
tcggcctctttgatcttttggtatag

SEQ ID NO: 18650 - DNA, 22 bp, Artificial Sequence
  Description of Artificial Sequence: Synthetic primer
cgctctaatgggcttcttcgat

SEQ ID NO: 18651 - DNA, 30 bp, Artificial Sequence
  Description of Artificial Sequence: Synthetic primer
gcacatatcataagaataacaacagtaggc

SEQ ID NO: 18652 - DNA, 29 bp, Artificial Sequence
  Description of Artificial Sequence: Synthetic primer
tcttgataaaatactcatctgacagtgct

SEQ ID NO: 18653 - DNA, 26 bp, Artificial Sequence
  Description of Artificial Sequence: Synthetic primer
gctgcttgcttgtgttaactaaacat

SEQ ID NO: 18654 - DNA, 25 bp, Artificial Sequence
  Description of Artificial Sequence: Synthetic primer
gagcatattcgagaaaccaccaaaa

SEQ ID NO: 18655 - DNA, 25 bp, Artificial Sequence
  Description of Artificial Sequence: Synthetic primer
acttccacaagatgctcacagatag

SEQ ID NO: 18656 - DNA, 22 bp, Artificial Sequence
  Description of Artificial Sequence: Synthetic primer
agcacgaacatacatgccaatg

SEQ ID NO: 18657 - DNA, 19 bp, Artificial Sequence
  Description of Artificial Sequence: Synthetic primer
aggaggcgatggtgagaac

SEQ ID NO: 18658 - DNA, 22 bp, Artificial Sequence
  Description of Artificial Sequence: Synthetic primer
tcctttacatggttgctgggaa

SEQ ID NO: 18659 - DNA, 26 bp, Artificial Sequence
  Description of Artificial Sequence: Synthetic primer
gcacaaatacaacaatggcagaaaga

SEQ ID NO: 18660 - DNA, 22 bp, Artificial Sequence
  Description of Artificial Sequence: Synthetic primer
atcaacaacaggatgcccaaag

SEQ ID NO: 18661 - DNA, 28 bp, Artificial Sequence
  Description of Artificial Sequence: Synthetic primer
aagtgattagagcatatttcaagccaag

SEQ ID NO: 18662 - DNA, 24 bp, Artificial Sequence
  Description of Artificial Sequence: Synthetic primer
ctcacgacagcaaacatactgaac

SEQ ID NO: 18663 - DNA, 22 bp, Artificial Sequence
  Description of Artificial Sequence: Synthetic primer
agtgcttttacttccccttgga

SEQ ID NO: 18664 - DNA, 24 bp, Artificial Sequence
  Description of Artificial Sequence: Synthetic primer
atgtacaaatataccccacacggt

SEQ ID NO: 18665 - DNA, 23 bp, Artificial Sequence
  Description of Artificial Sequence: Synthetic primer
cacatatgctactcctcccatcc

SEQ ID NO: 18666 - DNA, 21 bp, Artificial Sequence
  Description of Artificial Sequence: Synthetic primer
gatgaaccgaaagcggtaagg

SEQ ID NO: 18667 - DNA, 21 bp, Artificial Sequence
  Description of Artificial Sequence: Synthetic primer
ggctttcgggcttttgtcttg

SEQ ID NO: 18668 - DNA, 21 bp, Artificial Sequence
  Description of Artificial Sequence: Synthetic primer
cggaggatattgccgactgtg

SEQ ID NO: 18669 - DNA, 22 bp, Artificial Sequence
  Description of Artificial Sequence: Synthetic primer
agcctgaacttcgtccttagag

SEQ ID NO: 18670 - DNA, 22 bp, Artificial Sequence
  Description of Artificial Sequence: Synthetic primer
gggaaaactgtgcctgaagaac

SEQ ID NO: 18671 - DNA, 23 bp, Artificial Sequence
  Description of Artificial Sequence: Synthetic primer
gcgctaccacattacacgacata

SEQ ID NO: 18672 - DNA, 28 bp, Artificial Sequence
  Description of Artificial Sequence: Synthetic primer
cggttattccaaattccagaaacactag

SEQ ID NO: 18673 - DNA, 23 bp, Artificial Sequence
  Description of Artificial Sequence: Synthetic primer
actcttaagctcctgaggaggat

SEQ ID NO: 18674 - DNA, 21 bp, Artificial Sequence
  Description of Artificial Sequence: Synthetic primer
caaatggaaagcgacccctct

SEQ ID NO: 18675 - DNA, 23 bp, Artificial Sequence
  Description of Artificial Sequence: Synthetic primer
tttattcttgcggctaaatgcgt

SEQ ID NO: 18676 - DNA, 22 bp, Artificial Sequence
  Description of Artificial Sequence: Synthetic primer
caactgtaaccagccagaagga

SEQ ID NO: 18677 - DNA, 23 bp, Artificial Sequence
  Description of Artificial Sequence: Synthetic primer
gctcaggtgatttgatgagttcc

SEQ ID NO: 18678 - DNA, 20 bp, Artificial Sequence
  Description of Artificial Sequence: Synthetic primer
acgctatttctcggagcaca

SEQ ID NO: 18679 - DNA, 22 bp, Artificial Sequence
  Description of Artificial Sequence: Synthetic primer
tctcagattctcgacagaggct

SEQ ID NO: 18680 - DNA, 18 bp, Artificial Sequence
  Description of Artificial Sequence: Synthetic primer
tgctcgtcggcgaagaag

SEQ ID NO: 18681 - DNA, 22 bp, Artificial Sequence
  Description of Artificial Sequence: Synthetic primer
tgggtatcaactcaaggtgcat

SEQ ID NO: 18682 - DNA, 21 bp, Artificial Sequence
  Description of Artificial Sequence: Synthetic primer
tgccggaatattcatctgcct

SEQ ID NO: 18683 - DNA, 25 bp, Artificial Sequence
  Description of Artificial Sequence: Synthetic primer
gataataatcgcacaccagggttca

SEQ ID NO: 18684 - DNA, 22 bp, Artificial Sequence
  Description of Artificial Sequence: Synthetic primer
acgcctttgacctcaacatctt

SEQ ID NO: 18685 - DNA, 23 bp, Artificial Sequence
  Description of Artificial Sequence: Synthetic primer
agacggattgaagcgagtttttc

SEQ ID NO: 18686 - DNA, 21 bp, Artificial Sequence
  Description of Artificial Sequence: Synthetic primer
cagcaccgagacagatcttcg

SEQ ID NO: 18687 - DNA, 28 bp, Artificial Sequence
  Description of Artificial Sequence: Synthetic primer
gcttgtcttcagtcttgaactcattatt

SEQ ID NO: 18688 - DNA, 27 bp, Artificial Sequence
  Description of Artificial Sequence: Synthetic primer
agttagtaactgccaggttagacaaaa

SEQ ID NO: 18689 - DNA, 23 bp, Artificial Sequence
  Description of Artificial Sequence: Synthetic primer
cccacatggattgcataattccg

SEQ ID NO: 18690 - DNA, 27 bp, Artificial Sequence
  Description of Artificial Sequence: Synthetic primer
cattgagtaaagctatatggtccccaa

SEQ ID NO: 18691 - DNA, 21 bp, Artificial Sequence
  Description of Artificial Sequence: Synthetic primer
gcccagtcctcaatagccttg

SEQ ID NO: 18692 - DNA, 23 bp, Artificial Sequence
  Description of Artificial Sequence: Synthetic primer
tgaacttgttgcgtgattccttc

SEQ ID NO: 18693 - DNA, 28 bp, Artificial Sequence
  Description of Artificial Sequence: Synthetic primer
tcttcacgttgaactactatcaagcaaa

SEQ ID NO: 18694 - DNA, 21 bp, Artificial Sequence
  Description of Artificial Sequence: Synthetic primer
ccctgtagcgactttgacgaa

SEQ ID NO: 18695 - DNA, 18 bp, Artificial Sequence
  Description of Artificial Sequence: Synthetic primer
gggtttggccaccatgtg

SEQ ID NO: 18696 - DNA, 21 bp, Artificial Sequence
  Description of Artificial Sequence: Synthetic primer
ccctcacctgttcaccctatg

SEQ ID NO: 18697 - DNA, 23 bp, Artificial Sequence
  Description of Artificial Sequence: Synthetic primer
ctcttggtagagagctaggttgc

SEQ ID NO: 18698 - DNA, 27 bp, Artificial Sequence
  Description of Artificial Sequence: Synthetic primer
tattacacaaaggaccagttgacgaac

SEQ ID NO: 18699 - DNA, 29 bp, Artificial Sequence
  Description of Artificial Sequence: Synthetic primer
caagaatgtcatggaaagaatagcaaagt

SEQ ID NO: 18700 - DNA, 21 bp, Artificial Sequence
  Description of Artificial Sequence: Synthetic primer
tcagaggcaggtccatcaaag

SEQ ID NO: 18701 - DNA, 21 bp, Artificial Sequence
  Description of Artificial Sequence: Synthetic primer
gctacctacctgtggagacca

SEQ ID NO: 18702 - DNA, 26 bp, Artificial Sequence
  Description of Artificial Sequence: Synthetic primer
acgtccataacgaacatattttgtgc

SEQ ID NO: 18703 - DNA, 21 bp, Artificial Sequence
  Description of Artificial Sequence: Synthetic primer
agtcttccaactgctccgatg

SEQ ID NO: 18704 - DNA, 23 bp, Artificial Sequence
  Description of Artificial Sequence: Synthetic primer
tgtggtagaggaaacaaacagca

SEQ ID NO: 18705 - DNA, 27 bp, Artificial Sequence
  Description of Artificial Sequence: Synthetic primer
ttcttcttctcatggagctagattcag

SEQ ID NO: 18706 - DNA, 25 bp, Artificial Sequence
  Description of Artificial Sequence: Synthetic primer
ttgatagcccaatctactcttgtgg

SEQ ID NO: 18707 - DNA, 21 bp, Artificial Sequence
  Description of Artificial Sequence: Synthetic primer
ttccaggaccattaccccaac

SEQ ID NO: 18708 - DNA, 26 bp, Artificial Sequence
  Description of Artificial Sequence: Synthetic primer
tcttcctcgttttaggaaacccctta

SEQ ID NO: 18709 - DNA, 23 bp, Artificial Sequence
  Description of Artificial Sequence: Synthetic primer
cattacgccaccaactttcagaa

SEQ ID NO: 18710 - DNA, 21 bp, Artificial Sequence
  Description of Artificial Sequence: Synthetic primer
gcgttctctctattgcgagga

SEQ ID NO: 18711 - DNA, 23 bp, Artificial Sequence
  Description of Artificial Sequence: Synthetic primer
ctgacaaaatgaccgatgtgctt

SEQ ID NO: 18712 - DNA, 21 bp, Artificial Sequence
  Description of Artificial Sequence: Synthetic primer
gcgaagcgaagctatctgaag

SEQ ID NO: 18713 - DNA, 25 bp, Artificial Sequence
  Description of Artificial Sequence: Synthetic primer
tcagactagacggtacactatgagt

SEQ ID NO: 18714 - DNA, 28 bp, Artificial Sequence
  Description of Artificial Sequence: Synthetic primer
ggaaagtgctaaacaaacatctgaaaca

SEQ ID NO: 18715 - DNA, 25 bp, Artificial Sequence
  Description of Artificial Sequence: Synthetic primer
agtacttcacatagcattccaccag

SEQ ID NO: 18716 - DNA, 26 bp, Artificial Sequence
  Description of Artificial Sequence: Synthetic primer
agtgaacatcgacagtaatttgtgtg

SEQ ID NO: 18717 - DNA, 21 bp, Artificial Sequence
  Description of Artificial Sequence: Synthetic primer
ggtgcacgggatcgaaaattg

SEQ ID NO: 18718 - DNA, 21 bp, Artificial Sequence
  Description of Artificial Sequence: Synthetic primer
gttgatcacgcccatgatgtt

SEQ ID NO: 18719 - DNA, 21 bp, Artificial Sequence
  Description of Artificial Sequence: Synthetic primer
cgagatccttcagttgttgcg

SEQ ID NO: 18720 - DNA, 21 bp, Artificial Sequence
  Description of Artificial Sequence: Synthetic primer
agtatctgcgacagggtgatc

SEQ ID NO: 18721 - DNA, 25 bp, Artificial Sequence
  Description of Artificial Sequence: Synthetic primer
cctttgaagatccgtgaacaagaag

SEQ ID NO: 18722 - DNA, 22 bp, Artificial Sequence
  Description of Artificial Sequence: Synthetic primer
agccttgctgaccttctctatc

SEQ ID NO: 18723 - DNA, 28 bp, Artificial Sequence
  Description of Artificial Sequence: Synthetic primer
aacttctctgaatttgtttcctcaatcc

SEQ ID NO: 18724 - DNA, 29 bp, Artificial Sequence
  Description of Artificial Sequence: Synthetic primer
tcatgtactctataataggactggaagca

SEQ ID NO: 18725 - DNA, 21 bp, Artificial Sequence
  Description of Artificial Sequence: Synthetic primer
cctgatcttgcattcggcaaa

SEQ ID NO: 18726 - DNA, 25 bp, Artificial Sequence
  Description of Artificial Sequence: Synthetic primer
cccacgaggaacatttctagcaata

SEQ ID NO: 18727 - DNA, 23 bp, Artificial Sequence
  Description of Artificial Sequence: Synthetic primer
gaggatctcaattgcgatgcttg

SEQ ID NO: 18728 - DNA, 26 bp, Artificial Sequence
  Description of Artificial Sequence: Synthetic primer
gctcacaaaacaatgtcttcaacaag

SEQ ID NO: 18729 - DNA, 21 bp, Artificial Sequence
  Description of Artificial Sequence: Synthetic primer
atacagcgggccatccatttt

SEQ ID NO: 18730 - DNA, 28 bp, Artificial Sequence
  Description of Artificial Sequence: Synthetic primer
tgagtttttcttcactgtcatgctaaag

SEQ ID NO: 18731 - DNA, 22 bp, Artificial Sequence
  Description of Artificial Sequence: Synthetic primer
tgctggatagggttccattctg

SEQ ID NO: 18732 - DNA, 21 bp, Artificial Sequence
  Description of Artificial Sequence: Synthetic primer
atagagtcggagcgcaagttc

SEQ ID NO: 18733 - DNA, 25 bp, Artificial Sequence
  Description of Artificial Sequence: Synthetic primer
actataaaagtggagcaggagacct

SEQ ID NO: 18734 - DNA, 21 bp, Artificial Sequence
  Description of Artificial Sequence: Synthetic primer
gcctcctggatttccgaaaga

SEQ ID NO: 18735 - DNA, 28 bp, Artificial Sequence
  Description of Artificial Sequence: Synthetic primer
acttacctgttcactggataaaacatga

SEQ ID NO: 18736 - DNA, 21 bp, Artificial Sequence
  Description of Artificial Sequence: Synthetic primer
gggccacagcatcaatgaatt

SEQ ID NO: 18737 - DNA, 23 bp, Artificial Sequence
  Description of Artificial Sequence: Synthetic primer
ctctgcccagcaatctgcaatta

SEQ ID NO: 18738 - DNA, 27 bp, Artificial Sequence
  Description of Artificial Sequence: Synthetic primer
acgtaaggaacaacgatatgtaattgc

SEQ ID NO: 18739 - DNA, 19 bp, Artificial Sequence
  Description of Artificial Sequence: Synthetic primer
tggtgtgggtgtctgttgc

SEQ ID NO: 18740 - DNA, 25 bp, Artificial Sequence
  Description of Artificial Sequence: Synthetic primer
gcccaaggttatgaagcataaagac

SEQ ID NO: 18741 - DNA, 28 bp, Artificial Sequence
  Description of Artificial Sequence: Synthetic primer
ctagagaagataaacgacaaacaagcac

SEQ ID NO: 18742 - DNA, 25 bp, Artificial Sequence
  Description of Artificial Sequence: Synthetic primer
ctgtactcgactttttgcaaaacca

SEQ ID NO: 18743 - DNA, 25 bp, Artificial Sequence
  Description of Artificial Sequence: Synthetic primer
gcttctgaacatgtgatcttgacag

SEQ ID NO: 18744 - DNA, 23 bp, Artificial Sequence
  Description of Artificial Sequence: Synthetic primer
gctacctaacagctagggatgga

SEQ ID NO: 18745 - DNA, 19 bp, Artificial Sequence
  Description of Artificial Sequence: Synthetic primer
tccatggcctgctccttag

SEQ ID NO: 18746 - DNA, 27 bp, Artificial Sequence
  Description of Artificial Sequence: Synthetic primer
gactacccaccttattgacacaataca

SEQ ID NO: 18747 - DNA, 19 bp, Artificial Sequence
  Description of Artificial Sequence: Synthetic primer
gacacgccagcgtagttca

SEQ ID NO: 18748 - DNA, 24 bp, Artificial Sequence
  Description of Artificial Sequence: Synthetic primer
gcaattttctccacaagcagatca

SEQ ID NO: 18749 - DNA, 23 bp, Artificial Sequence
  Description of Artificial Sequence: Synthetic primer
accccagcttgtatgtcttttgg

SEQ ID NO: 18750 - DNA, 23 bp, Artificial Sequence
  Description of Artificial Sequence: Synthetic primer
gcaccatcccggtatactcatag

SEQ ID NO: 18751 - DNA, 26 bp, Artificial Sequence
  Description of Artificial Sequence: Synthetic primer
gtgccaaatcaaacctattctagcag

SEQ ID NO: 18752 - DNA, 24 bp, Artificial Sequence
  Description of Artificial Sequence: Synthetic primer
tcggtaacaggagtcttctcaatg

SEQ ID NO: 18753 - DNA, 24 bp, Artificial Sequence
  Description of Artificial Sequence: Synthetic primer
ctaagcagacacatgtgtgacaag

SEQ ID NO: 18754 - DNA, 26 bp, Artificial Sequence
  Description of Artificial Sequence: Synthetic primer
ccttgttagtttaccgagggtttctc

SEQ ID NO: 18755 - DNA, 27 bp, Artificial Sequence
  Description of Artificial Sequence: Synthetic primer
gcagtaaaggaaacagtatctctttcg

SEQ ID NO: 18756 - DNA, 26 bp, Artificial Sequence
  Description of Artificial Sequence: Synthetic primer
cacttccacagactcagaacttgtaa

SEQ ID NO: 18757 - DNA, 22 bp, Artificial Sequence
  Description of Artificial Sequence: Synthetic primer
tgcaagggagtagctgcatatc

SEQ ID NO: 18758 - DNA, 23 bp, Artificial Sequence
  Description of Artificial Sequence: Synthetic primer
actctgacccagcaacagatttt

SEQ ID NO: 18759 - DNA, 26 bp, Artificial Sequence
  Description of Artificial Sequence: Synthetic primer
ctctccaagtgagattcccatgattt

SEQ ID NO: 18760 - DNA, 25 bp, Artificial Sequence
  Description of Artificial Sequence: Synthetic primer
tgccaacattacatacgacacttgt

SEQ ID NO: 18761 - DNA, 24 bp, Artificial Sequence
  Description of Artificial Sequence: Synthetic primer
gtaggaagataagcccatgcagaa

SEQ ID NO: 18762 - DNA, 23 bp, Artificial Sequence
  Description of Artificial Sequence: Synthetic primer
gccttttgtatctgcatcctcca

SEQ ID NO: 18763 - DNA, 19 bp, Artificial Sequence
  Description of Artificial Sequence: Synthetic primer
gacgcatagccaaatgcca

SEQ ID NO: 18764 - DNA, 28 bp, Artificial Sequence
  Description of Artificial Sequence: Synthetic primer
gcaatcatgattggagcctttttaatgt

SEQ ID NO: 18765 - DNA, 23 bp, Artificial Sequence
  Description of Artificial Sequence: Synthetic primer
gagaagcaagcatagcagcataa

SEQ ID NO: 18766 - DNA, 25 bp, Artificial Sequence
  Description of Artificial Sequence: Synthetic primer
tggctgtatattttccctggaaagg

SEQ ID NO: 18767 - DNA, 25 bp, Artificial Sequence
  Description of Artificial Sequence: Synthetic primer
gcatttgctgctaagtacaaacaac

SEQ ID NO: 18768 - DNA, 22 bp, Artificial Sequence
  Description of Artificial Sequence: Synthetic primer
gcactagtcctgggatctgaac

SEQ ID NO: 18769 - DNA, 22 bp, Artificial Sequence
  Description of Artificial Sequence: Synthetic primer
tccagtcttcactccgatgttg

SEQ ID NO: 18770 - DNA, 25 bp, Artificial Sequence
  Description of Artificial Sequence: Synthetic primer
agagaaactaactgcatgacgaaca

SEQ ID NO: 18771 - DNA, 21 bp, Artificial Sequence
  Description of Artificial Sequence: Synthetic primer
agctcagtgcactccgctata

SEQ ID NO: 18772 - DNA, 28 bp, Artificial Sequence
  Description of Artificial Sequence: Synthetic primer
gcattcagatcaacgaaagaaagaaaca

SEQ ID NO: 18773 - DNA, 21 bp, Artificial Sequence
  Description of Artificial Sequence: Synthetic primer
tagtcgggtgtatgcttctgc

SEQ ID NO: 18774 - DNA, 19 bp, Artificial Sequence
  Description of Artificial Sequence: Synthetic primer
ctgccgttgtccatgtcca

SEQ ID NO: 18775 - DNA, 26 bp, Artificial Sequence
  Description of Artificial Sequence: Synthetic primer
gggaaattaatgagaaacacctcagc

SEQ ID NO: 18776 - DNA, 21 bp, Artificial Sequence
  Description of Artificial Sequence: Synthetic primer
cgatgctgaacccgaatgaga

SEQ ID NO: 18777 - DNA, 28 bp, Artificial Sequence
  Description of Artificial Sequence: Synthetic primer
ttgtagctaatgttttggtcacatgatc

SEQ ID NO: 18778 - DNA, 28 bp, Artificial Sequence
  Description of Artificial Sequence: Synthetic primer
tcctcgggctttatagaatttgtaaaca

SEQ ID NO: 18779 - DNA, 21 bp, Artificial Sequence
  Description of Artificial Sequence: Synthetic primer
ccaccatcaactgaagcacct

SEQ ID NO: 18780 - DNA, 27 bp, Artificial Sequence
  Description of Artificial Sequence: Synthetic primer
gtctactgacagtgctcttcatcttag

SEQ ID NO: 18781 - DNA, 26 bp, Artificial Sequence
  Description of Artificial Sequence: Synthetic primer
gcgtagttcatgtaacgtatcttccc

SEQ ID NO: 18782 - DNA, 28 bp, Artificial Sequence
  Description of Artificial Sequence: Synthetic primer
agcacaaacaaaattacacatcctttgg

SEQ ID NO: 18783 - DNA, 23 bp, Artificial Sequence
  Description of Artificial Sequence: Synthetic primer
ttgtaggcttttgaaccatcacg

SEQ ID NO: 18784 - DNA, 28 bp, Artificial Sequence
  Description of Artificial Sequence: Synthetic primer
caccttttgtcacttgacatatctgttg

SEQ ID NO: 18785 - DNA, 24 bp, Artificial Sequence
  Description of Artificial Sequence: Synthetic primer
tgtcgctttgaaatatctgcatgg

SEQ ID NO: 18786 - DNA, 21 bp, Artificial Sequence
  Description of Artificial Sequence: Synthetic primer
aattgcttggcacgaacaacg

SEQ ID NO: 18787 - DNA, 26 bp, Artificial Sequence
  Description of Artificial Sequence: Synthetic primer
tgcatctctaagtggtttaaggttgg

SEQ ID NO: 18788 - DNA, 27 bp, Artificial Sequence
  Description of Artificial Sequence: Synthetic primer
agtgaattacagagccttggatcatag

SEQ ID NO: 18789 - DNA, 28 bp, Artificial Sequence
  Description of Artificial Sequence: Synthetic primer
agaggtgatcatgcatatatagttaccc

SEQ ID NO: 18790 - DNA, 25 bp, Artificial Sequence
  Description of Artificial Sequence: Synthetic primer
tcacacactcaaatgagtgctaaca

SEQ ID NO: 18791 - DNA, 21 bp, Artificial Sequence
  Description of Artificial Sequence: Synthetic primer
gaacggagaggttgtgcacat

SEQ ID NO: 18792 - DNA, 21 bp, Artificial Sequence
  Description of Artificial Sequence: Synthetic primer
gggcagacatcccaaagcata

SEQ ID NO: 18793 - DNA, 21 bp, Artificial Sequence
  Description of Artificial Sequence: Synthetic primer
gcacgttcattatggttgcgt

SEQ ID NO: 18794 - DNA, 29 bp, Artificial Sequence
  Description of Artificial Sequence: Synthetic primer
ggatatactatatactccctccgatccat

SEQ ID NO: 18795 - DNA, 21 bp, Artificial Sequence
  Description of Artificial Sequence: Synthetic primer
ccaatacgatggatgcgcatg

SEQ ID NO: 18796 - DNA, 21 bp, Artificial Sequence
  Description of Artificial Sequence: Synthetic primer
tctcatcggagcctacaaggg

SEQ ID NO: 18797 - DNA, 23 bp, Artificial Sequence
  Description of Artificial Sequence: Synthetic primer
gctatcctggtgctttcaacatg

SEQ ID NO: 18798 - DNA, 25 bp, Artificial Sequence
  Description of Artificial Sequence: Synthetic primer
aatgaccactttattcagcagcttc

SEQ ID NO: 18799 - DNA, 21 bp, Artificial Sequence
  Description of Artificial Sequence: Synthetic primer
caccctgcggtttagcttcaa

SEQ ID NO: 18800 - DNA, 24 bp, Artificial Sequence
  Description of Artificial Sequence: Synthetic primer
tcaccgtggtctataactagctca

SEQ ID NO: 18801 - DNA, 24 bp, Artificial Sequence
  Description of Artificial Sequence: Synthetic primer
aacgtcatttcttccatgttcctg

SEQ ID NO: 18802 - DNA, 23 bp, Artificial Sequence
  Description of Artificial Sequence: Synthetic primer
gggagtggacaaagtacaaggtc

SEQ ID NO: 18803 - DNA, 18 bp, Artificial Sequence
  Description of Artificial Sequence: Synthetic primer
cccaccatcgccttctgc

SEQ ID NO: 18804 - DNA, 21 bp, Artificial Sequence
  Description of Artificial Sequence: Synthetic primer
ctcctcggctaactccttgag

SEQ ID NO: 18805 - DNA, 23 bp, Artificial Sequence
  Description of Artificial Sequence: Synthetic primer
agactgcggtttacatacactgg

SEQ ID NO: 18806 - DNA, 25 bp, Artificial Sequence
  Description of Artificial Sequence: Synthetic primer
gtcttctttgtgctcggttatttcg

SEQ ID NO: 18807 - DNA, 20 bp, Artificial Sequence
  Description of Artificial Sequence: Synthetic primer
gaccaagttgcgacgtcatc

SEQ ID NO: 18808 - DNA, 26 bp, Artificial Sequence
  Description of Artificial Sequence: Synthetic primer
acagaagaacataccacctaaacctg

SEQ ID NO: 18809 - DNA, 26 bp, Artificial Sequence
  Description of Artificial Sequence: Synthetic primer
gtgacgcaattgcagagaaagataat

SEQ ID NO: 18810 - DNA, 22 bp, Artificial Sequence
  Description of Artificial Sequence: Synthetic primer
tcttcttcaggtccatgttgcc

SEQ ID NO: 18811 - DNA, 24 bp, Artificial Sequence
  Description of Artificial Sequence: Synthetic primer
aagccatgttgaagtagaaagcac

SEQ ID NO: 18812 - DNA, 25 bp, Artificial Sequence
  Description of Artificial Sequence: Synthetic primer
ccttcttgcagaagttgatttcctt

SEQ ID NO: 18813 - DNA, 28 bp, Artificial Sequence
  Description of Artificial Sequence: Synthetic primer
ggttacaccgagtaaacttgaacaaatg

SEQ ID NO: 18814 - DNA, 26 bp, Artificial Sequence
  Description of Artificial Sequence: Synthetic primer
atgtcagcttaggaaaaagaatgagc

SEQ ID NO: 18815 - DNA, 27 bp, Artificial Sequence
  Description of Artificial Sequence: Synthetic primer
aggtattccaactagttcaaggacatc

SEQ ID NO: 18816 - DNA, 24 bp, Artificial Sequence
  Description of Artificial Sequence: Synthetic primer
accactctctgctgcattattagg

SEQ ID NO: 18817 - DNA, 28 bp, Artificial Sequence
  Description of Artificial Sequence: Synthetic primer
ggttcacatatcatgggagataaaggat

SEQ ID NO: 18818 - DNA, 21 bp, Artificial Sequence
  Description of Artificial Sequence: Synthetic primer
atgtagatggcccaggaatgc

SEQ ID NO: 18819 - DNA, 25 bp, Artificial Sequence
  Description of Artificial Sequence: Synthetic primer
tgcatggagcttctacatataaccc

SEQ ID NO: 18820 - DNA, 24 bp, Artificial Sequence
  Description of Artificial Sequence: Synthetic primer
gcgtacaccatcttgttcttgatg

SEQ ID NO: 18821 - DNA, 25 bp, Artificial Sequence
  Description of Artificial Sequence: Synthetic primer
ctggctttctgatcatcaaaaccaa

SEQ ID NO: 18822 - DNA, 21 bp, Artificial Sequence
  Description of Artificial Sequence: Synthetic primer
tgaggttcctcgcatattggg

SEQ ID NO: 18823 - DNA, 28 bp, Artificial Sequence
  Description of Artificial Sequence: Synthetic primer
aattcctgttctacactattgtttgtgc

SEQ ID NO: 18824 - DNA, 22 bp, Artificial Sequence
  Description of Artificial Sequence: Synthetic primer
ggaacaagagagcaatgtgggt

SEQ ID NO: 18825 - DNA, 28 bp, Artificial Sequence
  Description of Artificial Sequence: Synthetic primer
ccatcgaaagaaatgtaggtccatattg

SEQ ID NO: 18826 - DNA, 25 bp, Artificial Sequence
  Description of Artificial Sequence: Synthetic primer
actccttgtattctccatggagcta

SEQ ID NO: 18827 - DNA, 24 bp, Artificial Sequence
  Description of Artificial Sequence: Synthetic primer
ctctttccttctcttctggaccat

SEQ ID NO: 18828 - DNA, 23 bp, Artificial Sequence
  Description of Artificial Sequence: Synthetic primer
actccggctacaaatcaaacgat

SEQ ID NO: 18829 - DNA, 21 bp, Artificial Sequence
  Description of Artificial Sequence: Synthetic primer
actgctcttgaatggcaaccc

SEQ ID NO: 18830 - DNA, 22 bp, Artificial Sequence
  Description of Artificial Sequence: Synthetic primer
actgctttgcaccagattcttg

SEQ ID NO: 18831 - DNA, 22 bp, Artificial Sequence
  Description of Artificial Sequence: Synthetic primer
aagttgtgcccattctgcacta

SEQ ID NO: 18832 - DNA, 22 bp, Artificial Sequence
  Description of Artificial Sequence: Synthetic primer
cgagccagacaactgaagttct

SEQ ID NO: 18833 - DNA, 21 bp, Artificial Sequence
  Description of Artificial Sequence: Synthetic primer
gatctgcgatcgatcgacgaa

SEQ ID NO: 18834 - DNA, 29 bp, Artificial Sequence
  Description of Artificial Sequence: Synthetic primer
agcatattcaacttcccatcagatatacg

SEQ ID NO: 18835 - DNA, 23 bp, Artificial Sequence
  Description of Artificial Sequence: Synthetic primer
catgtttggcttccgaatcaagt

SEQ ID NO: 18836 - DNA, 22 bp, Artificial Sequence
  Description of Artificial Sequence: Synthetic primer
ctagtggcgctagctttgtttg

SEQ ID NO: 18837 - DNA, 21 bp, Artificial Sequence
  Description of Artificial Sequence: Synthetic primer
gctttgttagctccgtccgaa

SEQ ID NO: 18838 - DNA, 21 bp, Artificial Sequence
  Description of Artificial Sequence: Synthetic primer
gtcgttgtcgatctccgactc

SEQ ID NO: 18839 - DNA, 22 bp, Artificial Sequence
  Description of Artificial Sequence: Synthetic primer
cgacatagggctccgatagatc

SEQ ID NO: 18840 - DNA, 20 bp, Artificial Sequence
  Description of Artificial Sequence: Synthetic primer
gattcagtgctccggtcctc

SEQ ID NO: 18841 - DNA, 25 bp, Artificial Sequence
  Description of Artificial Sequence: Synthetic primer
ttcaagaaactcctcaaagtcgtca

SEQ ID NO: 18842 - DNA, 26 bp, Artificial Sequence
  Description of Artificial Sequence: Synthetic primer
caacagaaatccaaacacttcatcgt

SEQ ID NO: 18843 - DNA, 22 bp, Artificial Sequence
  Description of Artificial Sequence: Synthetic primer
acggttggtctctggaactatc

SEQ ID NO: 18844 - DNA, 21 bp, Artificial Sequence
  Description of Artificial Sequence: Synthetic primer
cccaggtgttacgagcaaaga

SEQ ID NO: 18845 - DNA, 21 bp, Artificial Sequence
  Description of Artificial Sequence: Synthetic primer
cgagcacgaaagcttcactct

SEQ ID NO: 18846 - DNA, 22 bp, Artificial Sequence
  Description of Artificial Sequence: Synthetic primer
gagcagatgacctcaaacacca

SEQ ID NO: 18847 - DNA, 21 bp, Artificial Sequence
  Description of Artificial Sequence: Synthetic primer
ctcctctcctctgggctgtta

SEQ ID NO: 18848 - DNA, 26 bp, Artificial Sequence
  Description of Artificial Sequence: Synthetic primer
actatacacatgatcgatcacctcac

SEQ ID NO: 18849 - DNA, 23 bp, Artificial Sequence
  Description of Artificial Sequence: Synthetic primer
cagcttcattggatttccagtgc

SEQ ID NO: 18850 - DNA, 21 bp, Artificial Sequence
  Description of Artificial Sequence: Synthetic primer
catctcctcctaccgcctctt

SEQ ID NO: 18851 - DNA, 21 bp, Artificial Sequence
  Description of Artificial Sequence: Synthetic primer
tgtcgtggtaacttggaggga

SEQ ID NO: 18852 - DNA, 24 bp, Artificial Sequence
  Description of Artificial Sequence: Synthetic primer
gtgtttcttttctgaaggtggcaa

SEQ ID NO: 18853 - DNA, 23 bp, Artificial Sequence
  Description of Artificial Sequence: Synthetic primer
caagacgcacacgcttaaaattg

SEQ ID NO: 18854 - DNA, 23 bp, Artificial Sequence
  Description of Artificial Sequence: Synthetic primer
tactccatccctagttcctgcca

SEQ ID NO: 18855 - DNA, 26 bp, Artificial Sequence
  Description of Artificial Sequence: Synthetic primer
actaaagtgtgctgatcaacagattg

SEQ ID NO: 18856 - DNA, 25 bp, Artificial Sequence
  Description of Artificial Sequence: Synthetic primer
tggtatgcactagtctacgactgta

SEQ ID NO: 18857 - DNA, 22 bp, Artificial Sequence
  Description of Artificial Sequence: Synthetic primer
cacatgacagagggcaacaatg

SEQ ID NO: 18858 - DNA, 25 bp, Artificial Sequence
  Description of Artificial Sequence: Synthetic primer
tccgcaaatagggatatcaaatggt

SEQ ID NO: 18859 - DNA, 22 bp, Artificial Sequence
  Description of Artificial Sequence: Synthetic primer
cgctcgagaatctttgtccatg

SEQ ID NO: 18860 - DNA, 21 bp, Artificial Sequence
  Description of Artificial Sequence: Synthetic primer
aatgctaggctcctgcttcat

SEQ ID NO: 18861 - DNA, 24 bp, Artificial Sequence
  Description of Artificial Sequence: Synthetic primer
caagagtgtgtctttgctgcaaaa

SEQ ID NO: 18862 - DNA, 21 bp, Artificial Sequence
  Description of Artificial Sequence: Synthetic primer
tgatgctccgccaaatgtacc

SEQ ID NO: 18863 - DNA, 28 bp, Artificial Sequence
  Description of Artificial Sequence: Synthetic primer
acttacttaagcacatgcaaatctaagc

SEQ ID NO: 18864 - DNA, 22 bp, Artificial Sequence
  Description of Artificial Sequence: Synthetic primer
gcatgacaagctgctagggtta

SEQ ID NO: 18865 - DNA, 24 bp, Artificial Sequence
  Description of Artificial Sequence: Synthetic primer
agaaattctcgaatcacctttgcg

SEQ ID NO: 18866 - DNA, 28 bp, Artificial Sequence
  Description of Artificial Sequence: Synthetic primer
aagctatggccaagttatgttaatgttt

SEQ ID NO: 18867 - DNA, 22 bp, Artificial Sequence
  Description of Artificial Sequence: Synthetic primer
ctcaaagcataacagcccacga

SEQ ID NO: 18868 - DNA, 26 bp, Artificial Sequence
  Description of Artificial Sequence: Synthetic primer
agtggttctcaattctatgacagagc

SEQ ID NO: 18869 - DNA, 26 bp, Artificial Sequence
  Description of Artificial Sequence: Synthetic primer
cccactggtaggaaaaggttatttga

SEQ ID NO: 18870 - DNA, 21 bp, Artificial Sequence
  Description of Artificial Sequence: Synthetic primer
cctgcttgaagaggccataga

SEQ ID NO: 18871 - DNA, 25 bp, Artificial Sequence
  Description of Artificial Sequence: Synthetic primer
agaacgagtggaataatcgaatcca

SEQ ID NO: 18872 - DNA, 27 bp, Artificial Sequence
  Description of Artificial Sequence: Synthetic primer
agggatacaagataagcaagacatgtg

SEQ ID NO: 18873 - DNA, 21 bp, Artificial Sequence
  Description of Artificial Sequence: Synthetic primer
tggcgatagcaaaacgattgc

SEQ ID NO: 18874 - DNA, 28 bp, Artificial Sequence
  Description of Artificial Sequence: Synthetic primer
gggctggatttacattctgatattgttc

SEQ ID NO: 18875 - DNA, 29 bp, Artificial Sequence
  Description of Artificial Sequence: Synthetic primer
ggattctcttcaaaatgagccttcaattt

SEQ ID NO: 18876 - DNA, 23 bp, Artificial Sequence
  Description of Artificial Sequence: Synthetic primer
tgtcctgctttcctaagctcttg

SEQ ID NO: 18877 - DNA, 21 bp, Artificial Sequence
  Description of Artificial Sequence: Synthetic primer
ccactgttgtttgcgatggtt

SEQ ID NO: 18878 - DNA, 22 bp, Artificial Sequence
  Description of Artificial Sequence: Synthetic primer
gatgccgaacatggtccatttg

SEQ ID NO: 18879 - DNA, 21 bp, Artificial Sequence
  Description of Artificial Sequence: Synthetic primer
ctacgcccactcatagcaagc

SEQ ID NO: 18880 - DNA, 21 bp, Artificial Sequence
  Description of Artificial Sequence: Synthetic primer
acacccgtctctcctatgcaa

SEQ ID NO: 18881 - DNA, 21 bp, Artificial Sequence
  Description of Artificial Sequence: Synthetic primer
aagccttgcgaagagcatcat

SEQ ID NO: 18882 - DNA, 21 bp, Artificial Sequence
  Description of Artificial Sequence: Synthetic primer
aactgattacgagcacgagca

SEQ ID NO: 18883 - DNA, 21 bp, Artificial Sequence
  Description of Artificial Sequence: Synthetic primer
aatgacgccaatttggcacac

SEQ ID NO: 18884 - DNA, 24 bp, Artificial Sequence
  Description of Artificial Sequence: Synthetic primer
accactttactatcagctgtcacg

SEQ ID NO: 18885 - DNA, 21 bp, Artificial Sequence
  Description of Artificial Sequence: Synthetic primer
gagcctttcgagtccttgctt

SEQ ID NO: 18886 - DNA, 25 bp, Artificial Sequence
  Description of Artificial Sequence: Synthetic primer
tcaaaagtgatgaggttacgagtgg

SEQ ID NO: 18887 - DNA, 21 bp, Artificial Sequence
  Description of Artificial Sequence: Synthetic primer
cttcacgcttgaccacaggag

SEQ ID NO: 18888 - DNA, 21 bp, Artificial Sequence
  Description of Artificial Sequence: Synthetic primer
agctcgagcaagaagcttgta

SEQ ID NO: 18889 - DNA, 21 bp, Artificial Sequence
  Description of Artificial Sequence: Synthetic primer
gcaaggagttcccacttccac

SEQ ID NO: 18890 - DNA, 22 bp, Artificial Sequence
  Description of Artificial Sequence: Synthetic primer
agatttccacaatgctcccgtt

SEQ ID NO: 18891 - DNA, 27 bp, Artificial Sequence
  Description of Artificial Sequence: Synthetic primer
tctaaacagacctcaaaagaatgtgct

SEQ ID NO: 18892 - DNA, 21 bp, Artificial Sequence
  Description of Artificial Sequence: Synthetic primer
caggtgcctcgtttgcttgta

SEQ ID NO: 18893 - DNA, 28 bp, Artificial Sequence
  Description of Artificial Sequence: Synthetic primer
gctcatccaatattgtcattgagttagg

SEQ ID NO: 18894 - DNA, 23 bp, Artificial Sequence
  Description of Artificial Sequence: Synthetic primer
tcctcagttcttgaggtccagat

SEQ ID NO: 18895 - DNA, 21 bp, Artificial Sequence
  Description of Artificial Sequence: Synthetic primer
tgtgctggagcttctcaagac

SEQ ID NO: 18896 - DNA, 21 bp, Artificial Sequence
  Description of Artificial Sequence: Synthetic primer
gctgtgtaggagatctgccaa

SEQ ID NO: 18897 - DNA, 24 bp, Artificial Sequence
  Description of Artificial Sequence: Synthetic primer
catcagtgtgattcagttctgtgc

SEQ ID NO: 18898 - DNA, 21 bp, Artificial Sequence
  Description of Artificial Sequence: Synthetic primer
gtagatggcgtcgaagcatcc

SEQ ID NO: 18899 - DNA, 21 bp, Artificial Sequence
  Description of Artificial Sequence: Synthetic primer
tcccagaaccacatgcttcca

SEQ ID NO: 18900 - DNA, 24 bp, Artificial Sequence
  Description of Artificial Sequence: Synthetic primer
tacagcaaaggtactccagtcaag

SEQ ID NO: 18901 - DNA, 22 bp, Artificial Sequence
  Description of Artificial Sequence: Synthetic primer
tggtcacaacaaaaccaaggtc

SEQ ID NO: 18902 - DNA, 28 bp, Artificial Sequence
  Description of Artificial Sequence: Synthetic primer
agatacaagaataccaggctcaacaaat

SEQ ID NO: 18903 - DNA, 21 bp, Artificial Sequence
  Description of Artificial Sequence: Synthetic primer
caagtaccccacggatggttc

SEQ ID NO: 18904 - DNA, 22 bp, Artificial Sequence
  Description of Artificial Sequence: Synthetic primer
agttgagatgccggaaagatgt

SEQ ID NO: 18905 - DNA, 21 bp, Artificial Sequence
  Description of Artificial Sequence: Synthetic primer
ggaatttcttcgctggagagc

SEQ ID NO: 18906 - DNA, 25 bp, Artificial Sequence
  Description of Artificial Sequence: Synthetic primer
tttcctgcatttaccagcttatcca

SEQ ID NO: 18907 - DNA, 25 bp, Artificial Sequence
  Description of Artificial Sequence: Synthetic primer
ccgtgctgaaaccgaaatttttagg

SEQ ID NO: 18908 - DNA, 24 bp, Artificial Sequence
  Description of Artificial Sequence: Synthetic primer
ccggtgtgcattctaagttcatca

SEQ ID NO: 18909 - DNA, 29 bp, Artificial Sequence
  Description of Artificial Sequence: Synthetic primer
caatctatcttgtggaaaactttttgagg

SEQ ID NO: 18910 - DNA, 29 bp, Artificial Sequence
  Description of Artificial Sequence: Synthetic primer
cagacttttcacattattttcatgccgta

SEQ ID NO: 18911 - DNA, 22 bp, Artificial Sequence
  Description of Artificial Sequence: Synthetic primer
tgatcaagcttccgtagtcgtc

SEQ ID NO: 18912 - DNA, 23 bp, Artificial Sequence
  Description of Artificial Sequence: Synthetic primer
ggatctgaacaacacaaacagca

SEQ ID NO: 18913 - DNA, 21 bp, Artificial Sequence
  Description of Artificial Sequence: Synthetic primer
tcaccggcagtcatcagagta

SEQ ID NO: 18914 - DNA, 21 bp, Artificial Sequence
  Description of Artificial Sequence: Synthetic primer
aaggatgcagaggccacaatt

SEQ ID NO: 18915 - DNA, 27 bp, Artificial Sequence
  Description of Artificial Sequence: Synthetic primer
acattatctcagtacatggacgagatc

SEQ ID NO: 18916 - DNA, 26 bp, Artificial Sequence
  Description of Artificial Sequence: Synthetic primer
agtaaactcctgtctcgtacaaaagg

SEQ ID NO: 18917 - DNA, 21 bp, Artificial Sequence
  Description of Artificial Sequence: Synthetic primer
caaacccggttcgtatcgcta

SEQ ID NO: 18918 - DNA, 27 bp, Artificial Sequence
  Description of Artificial Sequence: Synthetic primer
gagttcctcaatgttgaacataccatg

SEQ ID NO: 18919 - DNA, 22 bp, Artificial Sequence
  Description of Artificial Sequence: Synthetic primer
agaagacgcctatgacatggtt

SEQ ID NO: 18920 - DNA, 24 bp, Artificial Sequence
  Description of Artificial Sequence: Synthetic primer
tgtagtacttgcatccttggtctc

SEQ ID NO: 18921 - DNA, 25 bp, Artificial Sequence
  Description of Artificial Sequence: Synthetic primer
gcgaccttaaatatccactctgttg

SEQ ID NO: 18922 - DNA, 25 bp, Artificial Sequence
  Description of Artificial Sequence: Synthetic primer
tgttgcaactgacagatctctaact

SEQ ID NO: 18923 - DNA, 21 bp, Artificial Sequence
  Description of Artificial Sequence: Synthetic primer
cggactaacagcccatgtctc

SEQ ID NO: 18924 - DNA, 21 bp, Artificial Sequence
  Description of Artificial Sequence: Synthetic primer
gatctcccaacatgcacccaa

SEQ ID NO: 18925 - DNA, 25 bp, Artificial Sequence
  Description of Artificial Sequence: Synthetic primer
aatttcattgcatcctccatggaag

SEQ ID NO: 18926 - DNA, 21 bp, Artificial Sequence
  Description of Artificial Sequence: Synthetic primer
gtaactagacggtcggagcct

SEQ ID NO: 18927 - DNA, 21 bp, Artificial Sequence
  Description of Artificial Sequence: Synthetic primer
ccgtagcaggtggttttgatg

SEQ ID NO: 18928 - DNA, 23 bp, Artificial Sequence
  Description of Artificial Sequence: Synthetic primer
agcatccactgaaatgttatggc

SEQ ID NO: 18929 - DNA, 28 bp, Artificial Sequence
  Description of Artificial Sequence: Synthetic primer
tctatggcaacctaaatgaaacaactca

SEQ ID NO: 18930 - DNA, 24 bp, Artificial Sequence
  Description of Artificial Sequence: Synthetic primer
ccagagtatgcctcaaatatgcca

SEQ ID NO: 18931 - DNA, 23 bp, Artificial Sequence
  Description of Artificial Sequence: Synthetic primer
accgctatcatgttgagatctgc

SEQ ID NO: 18932 - DNA, 21 bp, Artificial Sequence
  Description of Artificial Sequence: Synthetic primer
agggttatcgtggctgtcaac

SEQ ID NO: 18933 - DNA, 27 bp, Artificial Sequence
  Description of Artificial Sequence: Synthetic primer
tctaattgctacttccatggattcctg

SEQ ID NO: 18934 - DNA, 21 bp, Artificial Sequence
  Description of Artificial Sequence: Synthetic primer
gtgtccatgagctccttggtt

SEQ ID NO: 18935 - DNA, 23 bp, Artificial Sequence
  Description of Artificial Sequence: Synthetic primer
ggaaggaagacctcctgattgat

SEQ ID NO: 18936 - DNA, 24 bp, Artificial Sequence
  Description of Artificial Sequence: Synthetic primer
tgactggatgatacgggaacaaat

SEQ ID NO: 18937 - DNA, 21 bp, Artificial Sequence
  Description of Artificial Sequence: Synthetic primer
taagcgcaaaagcctggagtg

SEQ ID NO: 18938 - DNA, 27 bp, Artificial Sequence
  Description of Artificial Sequence: Synthetic primer
ggactgttcgctgacatgtattaatca

SEQ ID NO: 18939 - DNA, 24 bp, Artificial Sequence
  Description of Artificial Sequence: Synthetic primer
acagcttcctgattgtacttcacg

SEQ ID NO: 18940 - DNA, 27 bp, Artificial Sequence
  Description of Artificial Sequence: Synthetic primer
ggcagttcatgagatgtaaaggttgta

SEQ ID NO: 18941 - DNA, 25 bp, Artificial Sequence
  Description of Artificial Sequence: Synthetic primer
cttcttgcaaatgatctgtggtgat

SEQ ID NO: 18942 - DNA, 22 bp, Artificial Sequence
  Description of Artificial Sequence: Synthetic primer
ccttctgctgaggccatattgt

SEQ ID NO: 18943 - DNA, 24 bp, Artificial Sequence
  Description of Artificial Sequence: Synthetic primer
agaagagaagcatcctaagcgaac

SEQ ID NO: 18944 - DNA, 21 bp, Artificial Sequence
  Description of Artificial Sequence: Synthetic primer
gtcctcccattccaggttgtc

SEQ ID NO: 18945 - DNA, 25 bp, Artificial Sequence
  Description of Artificial Sequence: Synthetic primer
gacagctgaagaaaacagtgatctc

SEQ ID NO: 18946 - DNA, 21 bp, Artificial Sequence
  Description of Artificial Sequence: Synthetic primer
gccttcgggttgaagttgtac

SEQ ID NO: 18947 - DNA, 27 bp, Artificial Sequence
  Description of Artificial Sequence: Synthetic primer
acctattcgtagaaatatgcggattgt

SEQ ID NO: 18948 - DNA, 24 bp, Artificial Sequence
  Description of Artificial Sequence: Synthetic primer
acactgaaactaaaactgctcggt

SEQ ID NO: 18949 - DNA, 22 bp, Artificial Sequence
  Description of Artificial Sequence: Synthetic primer
cttcttcatcgttgcagtgacc

SEQ ID NO: 18950 - DNA, 20 bp, Artificial Sequence
  Description of Artificial Sequence: Synthetic primer
cctcaacgtggatggtctcg

SEQ ID NO: 18951 - DNA, 29 bp, Artificial Sequence
  Description of Artificial Sequence: Synthetic primer
acttcagtgcatctaatcaaaaatcatcg

SEQ ID NO: 18952 - DNA, 27 bp, Artificial Sequence
  Description of Artificial Sequence: Synthetic primer
acgacatagcagaaggttaaaaagcta

SEQ ID NO: 18953 - DNA, 26 bp, Artificial Sequence
  Description of Artificial Sequence: Synthetic primer
cgttagagacctgtcctgttgtaaaa

SEQ ID NO: 18954 - DNA, 23 bp, Artificial Sequence
  Description of Artificial Sequence: Synthetic primer
ctgagaaatggccagagggtaaa

SEQ ID NO: 18955 - DNA, 21 bp, Artificial Sequence
  Description of Artificial Sequence: Synthetic primer
gaccacgatcagggtagctct

SEQ ID NO: 18956 - DNA, 26 bp, Artificial Sequence
  Description of Artificial Sequence: Synthetic primer
tgagaccctacaacagtgtttttagt

SEQ ID NO: 18957 - DNA, 24 bp, Artificial Sequence
  Description of Artificial Sequence: Synthetic primer
cagcagaggaaagcattcatcttg

SEQ ID NO: 18958 - DNA, 21 bp, Artificial Sequence
  Description of Artificial Sequence: Synthetic primer
aacgcctcaggaaatctccag

SEQ ID NO: 18959 - DNA, 23 bp, Artificial Sequence
  Description of Artificial Sequence: Synthetic primer
acaccacaccacaactccttaaa

SEQ ID NO: 18960 - DNA, 21 bp, Artificial Sequence
  Description of Artificial Sequence: Synthetic primer
agtactggccaagatcctcca

SEQ ID NO: 18961 - DNA, 19 bp, Artificial Sequence
  Description of Artificial Sequence: Synthetic primer
tgctgctgtgcctgcaata

SEQ ID NO: 18962 - DNA, 26 bp, Artificial Sequence
  Description of Artificial Sequence: Synthetic primer
acatcttgatgtcctattcacttgct

SEQ ID NO: 18963 - DNA, 26 bp, Artificial Sequence
  Description of Artificial Sequence: Synthetic primer
gccagaaactagataggttccatcat

SEQ ID NO: 18964 - DNA, 27 bp, Artificial Sequence
  Description of Artificial Sequence: Synthetic primer
tcacttgactgcaaatactaaccatgt

SEQ ID NO: 18965 - DNA, 23 bp, Artificial Sequence
  Description of Artificial Sequence: Synthetic primer
gccctccaacaacaggaacatta

SEQ ID NO: 18966 - DNA, 21 bp, Artificial Sequence
  Description of Artificial Sequence: Synthetic primer
cagcagctggttggctatcaa

SEQ ID NO: 18967 - DNA, 22 bp, Artificial Sequence
  Description of Artificial Sequence: Synthetic primer
gtacaggattacggagcacagg

SEQ ID NO: 18968 - DNA, 26 bp, Artificial Sequence
  Description of Artificial Sequence: Synthetic primer
aaaatgccaaaacttactaggactgc

SEQ ID NO: 18969 - DNA, 25 bp, Artificial Sequence
  Description of Artificial Sequence: Synthetic primer
caattccctcgcaaatggtagtatg

SEQ ID NO: 18970 - DNA, 24 bp, Artificial Sequence
  Description of Artificial Sequence: Synthetic primer
ctgtcccaactttaaaccaaccaa

SEQ ID NO: 18971 - DNA, 27 bp, Artificial Sequence
  Description of Artificial Sequence: Synthetic primer
cccattagtactagcgtcctttagaag

SEQ ID NO: 18972 - DNA, 21 bp, Artificial Sequence
  Description of Artificial Sequence: Synthetic primer
acaagaatcggtgctccggta

SEQ ID NO: 18973 - DNA, 28 bp, Artificial Sequence
  Description of Artificial Sequence: Synthetic primer
aacaatcacaagcatgtacaataatgga

SEQ ID NO: 18974 - DNA, 21 bp, Artificial Sequence
  Description of Artificial Sequence: Synthetic primer
ggttggtttcctcatgttgcg

SEQ ID NO: 18975 - DNA, 19 bp, Artificial Sequence
  Description of Artificial Sequence: Synthetic primer
gccagacaggtacttggct

SEQ ID NO: 18976 - DNA, 23 bp, Artificial Sequence
  Description of Artificial Sequence: Synthetic primer
gggtacccctaggcttattttgt

SEQ ID NO: 18977 - DNA, 18 bp, Artificial Sequence
  Description of Artificial Sequence: Synthetic primer
gtccttcgcgtcttccac

SEQ ID NO: 18978 - DNA, 22 bp, Artificial Sequence
  Description of Artificial Sequence: Synthetic primer
tttggttgctgaatggtaaccg

SEQ ID NO: 18979 - DNA, 21 bp, Artificial Sequence
  Description of Artificial Sequence: Synthetic primer
cgacctcctctcttcagcaaa

SEQ ID NO: 18980 - DNA, 27 bp, Artificial Sequence
  Description of Artificial Sequence: Synthetic primer
caataccagtaaacagagctaaaaccc

SEQ ID NO: 18981 - DNA, 23 bp, Artificial Sequence
  Description of Artificial Sequence: Synthetic primer
tccaaggagaagcacatcattct

SEQ ID NO: 18982 - DNA, 23 bp, Artificial Sequence
  Description of Artificial Sequence: Synthetic primer
tgtcgcctgtcttcactatcttg

SEQ ID NO: 18983 - DNA, 23 bp, Artificial Sequence
  Description of Artificial Sequence: Synthetic primer
ctcaagaccaacatcaaggcaca

SEQ ID NO: 18984 - DNA, 22 bp, Artificial Sequence
  Description of Artificial Sequence: Synthetic primer
agttttgcgccgaacaataaca

SEQ ID NO: 18985 - DNA, 21 bp, Artificial Sequence
  Description of Artificial Sequence: Synthetic primer
agcgttcaggcagaaagatgg

SEQ ID NO: 18986 - DNA, 24 bp, Artificial Sequence
  Description of Artificial Sequence: Synthetic primer
agattcttctgaagcctttttcgc

SEQ ID NO: 18987 - DNA, 21 bp, Artificial Sequence
  Description of Artificial Sequence: Synthetic primer
ggcgtctttctccttgtcctt

SEQ ID NO: 18988 - DNA, 21 bp, Artificial Sequence
  Description of Artificial Sequence: Synthetic primer
tccagtgtcctccatccctac

SEQ ID NO: 18989 - DNA, 23 bp, Artificial Sequence
  Description of Artificial Sequence: Synthetic primer
acaaacctcctcatgtcaacctc

SEQ ID NO: 18990 - DNA, 27 bp, Artificial Sequence
  Description of Artificial Sequence: Synthetic primer
cagcaacaaataataacactaccgtga

SEQ ID NO: 18991 - DNA, 23 bp, Artificial Sequence
  Description of Artificial Sequence: Synthetic primer
ctctcatatgtcgtcttgctgga

SEQ ID NO: 18992 - DNA, 25 bp, Artificial Sequence
  Description of Artificial Sequence: Synthetic primer
actatctctctatcaatgggcgaca

SEQ ID NO: 18993 - DNA, 26 bp, Artificial Sequence
  Description of Artificial Sequence: Synthetic primer
gccatcctcatctgattccatatcat

SEQ ID NO: 18994 - DNA, 18 bp, Artificial Sequence
  Description of Artificial Sequence: Synthetic primer
cttcagccgcaccgtctc

SEQ ID NO: 18995 - DNA, 21 bp, Artificial Sequence
  Description of Artificial Sequence: Synthetic primer
gtcaccgtcgctctcagattc

SEQ ID NO: 18996 - DNA, 22 bp, Artificial Sequence
  Description of Artificial Sequence: Synthetic primer
ggcagggattggagttgaaatg

SEQ ID NO: 18997 - DNA, 26 bp, Artificial Sequence
  Description of Artificial Sequence: Synthetic primer
agacattagccaacacagagagtaag

SEQ ID NO: 18998 - DNA, 24 bp, Artificial Sequence
  Description of Artificial Sequence: Synthetic primer
gtccaacatcacaggagagaaacc

SEQ ID NO: 18999 - DNA, 28 bp, Artificial Sequence
  Description of Artificial Sequence: Synthetic primer
tcctgaagtactcaaagaataaagctga

SEQ ID NO: 19000 - DNA, 28 bp, Artificial Sequence
  Description of Artificial Sequence: Synthetic primer
ccacaaacatttctcgtttacaagatca

SEQ ID NO: 19001 - DNA, 21 bp, Artificial Sequence
  Description of Artificial Sequence: Synthetic primer
cagcttctttcgcctcctttg

SEQ ID NO: 19002 - DNA, 24 bp, Artificial Sequence
  Description of Artificial Sequence: Synthetic primer
cagagagcctatctgtcatctgga

SEQ ID NO: 19003 - DNA, 22 bp, Artificial Sequence
  Description of Artificial Sequence: Synthetic primer
cagctcaacacaagtcacttgg

SEQ ID NO: 19004 - DNA, 21 bp, Artificial Sequence
  Description of Artificial Sequence: Synthetic primer
gtagacacttgcgagctggag

SEQ ID NO: 19005 - DNA, 23 bp, Artificial Sequence
  Description of Artificial Sequence: Synthetic primer
acagggaactttaggatcttggc

SEQ ID NO: 19006 - DNA, 22 bp, Artificial Sequence
  Description of Artificial Sequence: Synthetic primer
gcatagcgacctttacaagctg

SEQ ID NO: 19007 - DNA, 22 bp, Artificial Sequence
  Description of Artificial Sequence: Synthetic primer
gcgtatttgccgttgtattggt

SEQ ID NO: 19008 - DNA, 28 bp, Artificial Sequence
  Description of Artificial Sequence: Synthetic primer
ggagatgatgtcacatagcatacaacaa

SEQ ID NO: 19009 - DNA, 22 bp, Artificial Sequence
  Description of Artificial Sequence: Synthetic primer
agctagtatgcaaaccacagca

SEQ ID NO: 19010 - DNA, 21 bp, Artificial Sequence
  Description of Artificial Sequence: Synthetic primer
caatcctggtccaaagccagt

SEQ ID NO: 19011 - DNA, 21 bp, Artificial Sequence
  Description of Artificial Sequence: Synthetic primer
tcgagaacctgctcccttttc

SEQ ID NO: 19012 - DNA, 26 bp, Artificial Sequence
  Description of Artificial Sequence: Synthetic primer
cctatgagtaactggattcaccagga

SEQ ID NO: 19013 - DNA, 28 bp, Artificial Sequence
  Description of Artificial Sequence: Synthetic primer
catatggtacagatgttttcaacccttg

SEQ ID NO: 19014 - DNA, 21 bp, Artificial Sequence
  Description of Artificial Sequence: Synthetic primer
cacattccttccggccatacc

SEQ ID NO: 19015 - DNA, 24 bp, Artificial Sequence
  Description of Artificial Sequence: Synthetic primer
tttgcttcgattcctcgattttcc

SEQ ID NO: 19016 - DNA, 25 bp, Artificial Sequence
  Description of Artificial Sequence: Synthetic primer
cctgctaataatgctaacgctcatt

SEQ ID NO: 19017 - DNA, 21 bp, Artificial Sequence
  Description of Artificial Sequence: Synthetic primer
ctgaaccacgacgaaagtcac

SEQ ID NO: 19018 - DNA, 21 bp, Artificial Sequence
  Description of Artificial Sequence: Synthetic primer
tccgacaacaggtctagttgg

SEQ ID NO: 19019 - DNA, 27 bp, Artificial Sequence
  Description of Artificial Sequence: Synthetic primer
aacagatccagctagatatcacaagtg

SEQ ID NO: 19020 - DNA, 18 bp, Artificial Sequence
  Description of Artificial Sequence: Synthetic primer
gccaacatctgcgcagtg

SEQ ID NO: 19021 - DNA, 21 bp, Artificial Sequence
  Description of Artificial Sequence: Synthetic primer
ccgagaacatttgccttgacg

SEQ ID NO: 19022 - DNA, 22 bp, Artificial Sequence
  Description of Artificial Sequence: Synthetic primer
tcttgatcctgtgaccaatccc

SEQ ID NO: 19023 - DNA, 23 bp, Artificial Sequence
  Description of Artificial Sequence: Synthetic primer
gctgtaccccttcccagaatatc

SEQ ID NO: 19024 - DNA, 29 bp, Artificial Sequence
  Description of Artificial Sequence: Synthetic primer
cattgagaatgtactactgtttacaggat

SEQ ID NO: 19025 - DNA, 21 bp, Artificial Sequence
  Description of Artificial Sequence: Synthetic primer
ttgaccgaaggcttggtgaat

SEQ ID NO: 19026 - DNA, 25 bp, Artificial Sequence
  Description of Artificial Sequence: Synthetic primer
ctttaagggtcacactgtgaaaacc

SEQ ID NO: 19027 - DNA, 22 bp, Artificial Sequence
  Description of Artificial Sequence: Synthetic primer
tctcggtgctttcttcttcctc

SEQ ID NO: 19028 - DNA, 21 bp, Artificial Sequence
  Description of Artificial Sequence: Synthetic primer
gagacacggctagggattgat

SEQ ID NO: 19029 - DNA, 21 bp, Artificial Sequence
  Description of Artificial Sequence: Synthetic primer
cagccgtcatctgcaatggta

SEQ ID NO: 19030 - DNA, 29 bp, Artificial Sequence
  Description of Artificial Sequence: Synthetic primer
ccatctccatatagatcattccattgagt

SEQ ID NO: 19031 - DNA, 21 bp, Artificial Sequence
  Description of Artificial Sequence: Synthetic primer
tgtaggtggtcctgagcttgc

SEQ ID NO: 19032 - DNA, 28 bp, Artificial Sequence
  Description of Artificial Sequence: Synthetic primer
tttctatcaaacaaagcaatcaagaacg

SEQ ID NO: 19033 - DNA, 19 bp, Artificial Sequence
  Description of Artificial Sequence: Synthetic primer
cctgcgtctccagagcaaa

SEQ ID NO: 19034 - DNA, 28 bp, Artificial Sequence
  Description of Artificial Sequence: Synthetic primer
agtttacaaatcagaatgtgcacaacaa

SEQ ID NO: 19035 - DNA, 23 bp, Artificial Sequence
  Description of Artificial Sequence: Synthetic primer
tctaactccgacttcacatccga

SEQ ID NO: 19036 - DNA, 21 bp, Artificial Sequence
  Description of Artificial Sequence: Synthetic primer
ctgtaccagacaggaccactg

SEQ ID NO: 19037 - DNA, 21 bp, Artificial Sequence
  Description of Artificial Sequence: Synthetic primer
ctacacccacgcaccatacac

SEQ ID NO: 19038 - DNA, 28 bp, Artificial Sequence
  Description of Artificial Sequence: Synthetic primer
cctcgtggtgatgtatggatatagtagt

SEQ ID NO: 19039 - DNA, 24 bp, Artificial Sequence
  Description of Artificial Sequence: Synthetic primer
tccaaatttggtacatgcacgatc

SEQ ID NO: 19040 - DNA, 30 bp, Artificial Sequence
  Description of Artificial Sequence: Synthetic primer
tgatttacattaggaaggcaatctatgtgt

SEQ ID NO: 19041 - DNA, 22 bp, Artificial Sequence
  Description of Artificial Sequence: Synthetic primer
tgtaggtcagaaccagggaaac

SEQ ID NO: 19042 - DNA, 25 bp, Artificial Sequence
  Description of Artificial Sequence: Synthetic primer
gctcatatctcgctgaggtactcta

SEQ ID NO: 19043 - DNA, 26 bp, Artificial Sequence
  Description of Artificial Sequence: Synthetic primer
gcgcggaattttcacattctaatttt

SEQ ID NO: 19044 - DNA, 21 bp, Artificial Sequence
  Description of Artificial Sequence: Synthetic primer
gggttggaggaatctggttct

SEQ ID NO: 19045 - DNA, 23 bp, Artificial Sequence
  Description of Artificial Sequence: Synthetic primer
cttcttcctcttgagctgtgact

SEQ ID NO: 19046 - DNA, 24 bp, Artificial Sequence
  Description of Artificial Sequence: Synthetic primer
tcctgagtgcagcttctattttgt

SEQ ID NO: 19047 - DNA, 24 bp, Artificial Sequence
  Description of Artificial Sequence: Synthetic primer
cctaaaaactgggttcggttgttt

SEQ ID NO: 19048 - DNA, 25 bp, Artificial Sequence
  Description of Artificial Sequence: Synthetic primer
agaaaagaaaaggagatctcccaca

SEQ ID NO: 19049 - DNA, 27 bp, Artificial Sequence
  Description of Artificial Sequence: Synthetic primer
cactttatcatcattaggcagcaagtc

SEQ ID NO: 19050 - DNA, 23 bp, Artificial Sequence
  Description of Artificial Sequence: Synthetic primer
tgccgaatcacttccttcaaagt

SEQ ID NO: 19051 - DNA, 27 bp, Artificial Sequence
  Description of Artificial Sequence: Synthetic primer
caattctctgtgaagaaacatcctgac

SEQ ID NO: 19052 - DNA, 22 bp, Artificial Sequence
  Description of Artificial Sequence: Synthetic primer
gactccattccttccaagtcgt

SEQ ID NO: 19053 - DNA, 28 bp, Artificial Sequence
  Description of Artificial Sequence: Synthetic primer
ccaatgaatcttcagatgtaaacaaggg

SEQ ID NO: 19054 - DNA, 21 bp, Artificial Sequence
  Description of Artificial Sequence: Synthetic primer
tgctccgtatgcaccataagc

SEQ ID NO: 19055 - DNA, 28 bp, Artificial Sequence
  Description of Artificial Sequence: Synthetic primer
ctagtagaagagagcttatgtgacacag

SEQ ID NO: 19056 - DNA, 27 bp, Artificial Sequence
  Description of Artificial Sequence: Synthetic primer
tcaaccttagcgtagtaatctttccag

SEQ ID NO: 19057 - DNA, 28 bp, Artificial Sequence
  Description of Artificial Sequence: Synthetic primer
atgaagttgttgttgtccaaatacaagt

SEQ ID NO: 19058 - DNA, 28 bp, Artificial Sequence
  Description of Artificial Sequence: Synthetic primer
aaaacgatgctacaaagagattcttctg

SEQ ID NO: 19059 - DNA, 21 bp, Artificial Sequence
  Description of Artificial Sequence: Synthetic primer
gggaatggcgaactgagtacc

SEQ ID NO: 19060 - DNA, 23 bp, Artificial Sequence
  Description of Artificial Sequence: Synthetic primer
tgtagctctttctccgggtaaac

SEQ ID NO: 19061 - DNA, 19 bp, Artificial Sequence
  Description of Artificial Sequence: Synthetic primer
agcttcgagtgcttcgcat

SEQ ID NO: 19062 - DNA, 24 bp, Artificial Sequence
  Description of Artificial Sequence: Synthetic primer
cgtagtctacgttccgatatgtcc

SEQ ID NO: 19063 - DNA, 21 bp, Artificial Sequence
  Description of Artificial Sequence: Synthetic primer
cttcccttccaacctcagcac

SEQ ID NO: 19064 - DNA, 18 bp, Artificial Sequence
  Description of Artificial Sequence: Synthetic primer
tgtcagcatgccccttgg

SEQ ID NO: 19065 - DNA, 22 bp, Artificial Sequence
  Description of Artificial Sequence: Synthetic primer
ccctccagttcatccgagtatc

SEQ ID NO: 19066 - DNA, 27 bp, Artificial Sequence
  Description of Artificial Sequence: Synthetic primer
ctgtcaaatctttctgcacaactatgt

SEQ ID NO: 19067 - DNA, 25 bp, Artificial Sequence
  Description of Artificial Sequence: Synthetic primer
ctacatagatacctcaggagaaggg

SEQ ID NO: 19068 - DNA, 22 bp, Artificial Sequence
  Description of Artificial Sequence: Synthetic primer
cgttcctttctatcgctggagt

SEQ ID NO: 19069 - DNA, 22 bp, Artificial Sequence
  Description of Artificial Sequence: Synthetic primer
gaggctgaagatgttggtggta

SEQ ID NO: 19070 - DNA, 24 bp, Artificial Sequence
  Description of Artificial Sequence: Synthetic primer
gtaacgctaacagctatgctttcc

SEQ ID NO: 19071 - DNA, 23 bp, Artificial Sequence
  Description of Artificial Sequence: Synthetic primer
tgctctttgttgcagtgaccata

SEQ ID NO: 19072 - DNA, 22 bp, Artificial Sequence
  Description of Artificial Sequence: Synthetic primer
tacgaggatgccggtgacaata

SEQ ID NO: 19073 - DNA, 26 bp, Artificial Sequence
  Description of Artificial Sequence: Synthetic primer
ggcaagatttccattcccaagaaaaa

SEQ ID NO: 19074 - DNA, 27 bp, Artificial Sequence
  Description of Artificial Sequence: Synthetic primer
gtagtcgacgtttttcatcttcctttt

SEQ ID NO: 19075 - DNA, 21 bp, Artificial Sequence
  Description of Artificial Sequence: Synthetic primer
agcactacagggagctacaga

SEQ ID NO: 19076 - DNA, 28 bp, Artificial Sequence
  Description of Artificial Sequence: Synthetic primer
ccatccaaatgttatccaggaagaatga

SEQ ID NO: 19077 - DNA, 19 bp, Artificial Sequence
  Description of Artificial Sequence: Synthetic primer
acagctgcgctctcgattt

SEQ ID NO: 19078 - DNA, 25 bp, Artificial Sequence
  Description of Artificial Sequence: Synthetic primer
tcgaaaataatgcttggatccaacc

SEQ ID NO: 19079 - DNA, 26 bp, Artificial Sequence
  Description of Artificial Sequence: Synthetic primer
tgcttattcaaattcacatcgagcca

SEQ ID NO: 19080 - DNA, 28 bp, Artificial Sequence
  Description of Artificial Sequence: Synthetic primer
acctcctctccattgctatatacttagg

SEQ ID NO: 19081 - DNA, 24 bp, Artificial Sequence
  Description of Artificial Sequence: Synthetic primer
ctaacgcatatccacattctccgt

SEQ ID NO: 19082 - DNA, 28 bp, Artificial Sequence
  Description of Artificial Sequence: Synthetic primer
ggttcacaacaacatttaatttggttcc

SEQ ID NO: 19083 - DNA, 21 bp, Artificial Sequence
  Description of Artificial Sequence: Synthetic primer
ccagtgcgcagacatgactta

SEQ ID NO: 19084 - DNA, 21 bp, Artificial Sequence
  Description of Artificial Sequence: Synthetic primer
acgactatacaagctgcacca

SEQ ID NO: 19085 - DNA, 21 bp, Artificial Sequence
  Description of Artificial Sequence: Synthetic primer
gcccatctagctggacatgag

SEQ ID NO: 19086 - DNA, 26 bp, Artificial Sequence
  Description of Artificial Sequence: Synthetic primer
gcgggtcaaattatgaccataagatc

SEQ ID NO: 19087 - DNA, 28 bp, Artificial Sequence
  Description of Artificial Sequence: Synthetic primer
ggctggaaattcaacatatcttgaagga

SEQ ID NO: 19088 - DNA, 21 bp, Artificial Sequence
  Description of Artificial Sequence: Synthetic primer
ggcaggagcgaatccatgtat

SEQ ID NO: 19089 - DNA, 25 bp, Artificial Sequence
  Description of Artificial Sequence: Synthetic primer
actacaggttaacgatcatcatccc

SEQ ID NO: 19090 - DNA, 21 bp, Artificial Sequence
  Description of Artificial Sequence: Synthetic primer
caaggctgagctctgtgtacc

SEQ ID NO: 19091 - DNA, 28 bp, Artificial Sequence
  Description of Artificial Sequence: Synthetic primer
gtaaaggtgtagaacacaaatagtgcaa

SEQ ID NO: 19092 - DNA, 24 bp, Artificial Sequence
  Description of Artificial Sequence: Synthetic primer
aaagaaactctatgggacctcgtc

SEQ ID NO: 19093 - DNA, 23 bp, Artificial Sequence
  Description of Artificial Sequence: Synthetic primer
cctccagatcgatagcatttggt

SEQ ID NO: 19094 - DNA, 26 bp, Artificial Sequence
  Description of Artificial Sequence: Synthetic primer
atcttgagcttctttcgacaagtagt

SEQ ID NO: 19095 - DNA, 26 bp, Artificial Sequence
  Description of Artificial Sequence: Synthetic primer
gcaattattcttaaaccacagcctca

SEQ ID NO: 19096 - DNA, 18 bp, Artificial Sequence
  Description of Artificial Sequence: Synthetic primer
ggagcgcgaccgtatgtt

SEQ ID NO: 19097 - DNA, 22 bp, Artificial Sequence
  Description of Artificial Sequence: Synthetic primer
ttggtctctttgcctctcaact

SEQ ID NO: 19098 - DNA, 28 bp, Artificial Sequence
  Description of Artificial Sequence: Synthetic primer
gtcatatggatgatgataaaggtctcca

SEQ ID NO: 19099 - DNA, 27 bp, Artificial Sequence
  Description of Artificial Sequence: Synthetic primer
cattgatactcaagtgaggacttcaca

SEQ ID NO: 19100 - DNA, 21 bp, Artificial Sequence
  Description of Artificial Sequence: Synthetic primer
ctgctggctgttgcatcattg

SEQ ID NO: 19101 - DNA, 23 bp, Artificial Sequence
  Description of Artificial Sequence: Synthetic primer
ccctttactcgaacacacagtga

SEQ ID NO: 19102 - DNA, 23 bp, Artificial Sequence
  Description of Artificial Sequence: Synthetic primer
actacctagaatgctgagggtgt

SEQ ID NO: 19103 - DNA, 22 bp, Artificial Sequence
  Description of Artificial Sequence: Synthetic primer
cgacgacacgatcttcttcctc

SEQ ID NO: 19104 - DNA, 28 bp, Artificial Sequence
  Description of Artificial Sequence: Synthetic primer
gctacatgattacatacagaggctatca

SEQ ID NO: 19105 - DNA, 22 bp, Artificial Sequence
  Description of Artificial Sequence: Synthetic primer
tctgattccgctgccaagttaa

SEQ ID NO: 19106 - DNA, 21 bp, Artificial Sequence
  Description of Artificial Sequence: Synthetic primer
attgcaccgaacctcacagaa

SEQ ID NO: 19107 - DNA, 27 bp, Artificial Sequence
  Description of Artificial Sequence: Synthetic primer
cagcaaataatcagaagtccaaattgc

SEQ ID NO: 19108 - DNA, 25 bp, Artificial Sequence
  Description of Artificial Sequence: Synthetic primer
tcgatttcagtacttagccgaacaa

SEQ ID NO: 19109 - DNA, 24 bp, Artificial Sequence
  Description of Artificial Sequence: Synthetic primer
accctaatatctttggcaggtgga

SEQ ID NO: 19110 - DNA, 26 bp, Artificial Sequence
  Description of Artificial Sequence: Synthetic primer
gcttcggtcatatcactagctttctt

SEQ ID NO: 19111 - DNA, 22 bp, Artificial Sequence
  Description of Artificial Sequence: Synthetic primer
caagcgagaaaagagtcgggta

SEQ ID NO: 19112 - DNA, 21 bp, Artificial Sequence
  Description of Artificial Sequence: Synthetic primer
tgagtagtgctggaagttggc

SEQ ID NO: 19113 - DNA, 27 bp, Artificial Sequence
  Description of Artificial Sequence: Synthetic primer
gtacaaaatgttgcataatcacctgga

SEQ ID NO: 19114 - DNA, 22 bp, Artificial Sequence
  Description of Artificial Sequence: Synthetic primer
ggctctaaatcgaactggcgaa

SEQ ID NO: 19115 - DNA, 25 bp, Artificial Sequence
  Description of Artificial Sequence: Synthetic primer
gctacattttggacaagcatcgatt

SEQ ID NO: 19116 - DNA, 19 bp, Artificial Sequence
  Description of Artificial Sequence: Synthetic primer
tctgccccttaagccctga

SEQ ID NO: 19117 - DNA, 27 bp, Artificial Sequence
  Description of Artificial Sequence: Synthetic primer
acattagctgagcacaatatctgatgg

SEQ ID NO: 19118 - DNA, 22 bp, Artificial Sequence
  Description of Artificial Sequence: Synthetic primer
agaaatcggagaactcgtcgtc

SEQ ID NO: 19119 - DNA, 22 bp, Artificial Sequence
  Description of Artificial Sequence: Synthetic primer
gcagcaagtgtaacagcaacaa

SEQ ID NO: 19120 - DNA, 18 bp, Artificial Sequence
  Description of Artificial Sequence: Synthetic primer
ggagacggcttggtgtcg

SEQ ID NO: 19121 - DNA, 24 bp, Artificial Sequence
  Description of Artificial Sequence: Synthetic primer
gatggcgacacatatgaacatagc

SEQ ID NO: 19122 - DNA, 23 bp, Artificial Sequence
  Description of Artificial Sequence: Synthetic primer
tgccaaacatatagcctgtcaca

SEQ ID NO: 19123 - DNA, 28 bp, Artificial Sequence
  Description of Artificial Sequence: Synthetic primer
cttctcttctactacctttcaaaactgg

SEQ ID NO: 19124 - DNA, 26 bp, Artificial Sequence
  Description of Artificial Sequence: Synthetic primer
caactatgttgcgtgcaataaacaac

SEQ ID NO: 19125 - DNA, 26 bp, Artificial Sequence
  Description of Artificial Sequence: Synthetic primer
agggacagataaatgtttccacacaa

SEQ ID NO: 19126 - DNA, 22 bp, Artificial Sequence
  Description of Artificial Sequence: Synthetic primer
gggagcctgtcttgttcatttg

SEQ ID NO: 19127 - DNA, 25 bp, Artificial Sequence
  Description of Artificial Sequence: Synthetic primer
ttttctttctcctgttgctccatga

SEQ ID NO: 19128 - DNA, 26 bp, Artificial Sequence
  Description of Artificial Sequence: Synthetic primer
aagatcatacaacaaaagggtaacgc

SEQ ID NO: 19129 - DNA, 26 bp, Artificial Sequence
  Description of Artificial Sequence: Synthetic primer
tgttacaacaatatactgcagccgat

SEQ ID NO: 19130 - DNA, 28 bp, Artificial Sequence
  Description of Artificial Sequence: Synthetic primer
ttcctagcttgtttaataccatccttct

SEQ ID NO: 19131 - DNA, 22 bp, Artificial Sequence
  Description of Artificial Sequence: Synthetic primer
gttccttctcatcgggatgacc

SEQ ID NO: 19132 - DNA, 21 bp, Artificial Sequence
  Description of Artificial Sequence: Synthetic primer
ttgcattggtgaggaggtacg

SEQ ID NO: 19133 - DNA, 28 bp, Artificial Sequence
  Description of Artificial Sequence: Synthetic primer
gcgatgatctcttggaatgtatactctt

SEQ ID NO: 19134 - DNA, 22 bp, Artificial Sequence
  Description of Artificial Sequence: Synthetic primer
tcgttagctgtgcaaaagaagg

SEQ ID NO: 19135 - DNA, 25 bp, Artificial Sequence
  Description of Artificial Sequence: Synthetic primer
ccctttctttcctttcttctttccg

SEQ ID NO: 19136 - DNA, 22 bp, Artificial Sequence
  Description of Artificial Sequence: Synthetic primer
gtgacacacatgccgtgataac

SEQ ID NO: 19137 - DNA, 21 bp, Artificial Sequence
  Description of Artificial Sequence: Synthetic primer
caatcgtgccgatccttgttc

SEQ ID NO: 19138 - DNA, 26 bp, Artificial Sequence
  Description of Artificial Sequence: Synthetic primer
gggaggttctctgttaagttatgtgt

SEQ ID NO: 19139 - DNA, 21 bp, Artificial Sequence
  Description of Artificial Sequence: Synthetic primer
atcgaagttcaacggcgagaa

SEQ ID NO: 19140 - DNA, 21 bp, Artificial Sequence
  Description of Artificial Sequence: Synthetic primer
tcgctatctcgggcattactg

SEQ ID NO: 19141 - DNA, 25 bp, Artificial Sequence
  Description of Artificial Sequence: Synthetic primer
ggaatgactcttcccttgaacaaga

SEQ ID NO: 19142 - DNA, 21 bp, Artificial Sequence
  Description of Artificial Sequence: Synthetic primer
tctacagacgaccgtttcacc

SEQ ID NO: 19143 - DNA, 21 bp, Artificial Sequence
  Description of Artificial Sequence: Synthetic primer
aatgcaaactgagaggcacca

SEQ ID NO: 19144 - DNA, 27 bp, Artificial Sequence
  Description of Artificial Sequence: Synthetic primer
gccttattcatctgcgatcgaacatta

SEQ ID NO: 19145 - DNA, 28 bp, Artificial Sequence
  Description of Artificial Sequence: Synthetic primer
gactaaggcctgatttggattaatgagt

SEQ ID NO: 19146 - DNA, 22 bp, Artificial Sequence
  Description of Artificial Sequence: Synthetic primer
tggagctctgtgataacaacgg

SEQ ID NO: 19147 - DNA, 25 bp, Artificial Sequence
  Description of Artificial Sequence: Synthetic primer
tcttctacagcttagtcatgtgacc

SEQ ID NO: 19148 - DNA, 19 bp, Artificial Sequence
  Description of Artificial Sequence: Synthetic primer
ctgccatcatcgcccaatg

SEQ ID NO: 19149 - DNA, 25 bp, Artificial Sequence
  Description of Artificial Sequence: Synthetic primer
tggaggtatagtccctgaaacgtta

SEQ ID NO: 19150 - DNA, 21 bp, Artificial Sequence
  Description of Artificial Sequence: Synthetic primer
cagcaatcctgttccccatcc

SEQ ID NO: 19151 - DNA, 23 bp, Artificial Sequence
  Description of Artificial Sequence: Synthetic primer
cgatgcttacggaagaaacacca

SEQ ID NO: 19152 - DNA, 23 bp, Artificial Sequence
  Description of Artificial Sequence: Synthetic primer
ccaatgtaatcatacagcacgca

SEQ ID NO: 19153 - DNA, 19 bp, Artificial Sequence
  Description of Artificial Sequence: Synthetic primer
ctccagcgtctccagcttc

SEQ ID NO: 19154 - DNA, 22 bp, Artificial Sequence
  Description of Artificial Sequence: Synthetic primer
ccgactgcagtttatactggct

SEQ ID NO: 19155 - DNA, 28 bp, Artificial Sequence
  Description of Artificial Sequence: Synthetic primer
aggacatcatatctatttgctcttgcat

SEQ ID NO: 19156 - DNA, 22 bp, Artificial Sequence
  Description of Artificial Sequence: Synthetic primer
tatgctccatgccagttgatgc

SEQ ID NO: 19157 - DNA, 22 bp, Artificial Sequence
  Description of Artificial Sequence: Synthetic primer
acgctagtactgaaccctctca

SEQ ID NO: 19158 - DNA, 21 bp, Artificial Sequence
  Description of Artificial Sequence: Synthetic primer
ctgctgcggatcttttgttgt

SEQ ID NO: 19159 - DNA, 28 bp, Artificial Sequence
  Description of Artificial Sequence: Synthetic primer
caatcatagactacggatcgatcatgtc

SEQ ID NO: 19160 - DNA, 25 bp, Artificial Sequence
  Description of Artificial Sequence: Synthetic primer
agcttagattcagtttggttcatgc

SEQ ID NO: 19161 - DNA, 21 bp, Artificial Sequence
  Description of Artificial Sequence: Synthetic primer
ctggttctcttccgtccgaaa

SEQ ID NO: 19162 - DNA, 21 bp, Artificial Sequence
  Description of Artificial Sequence: Synthetic primer
gtgcataagcctcgaggaaga

SEQ ID NO: 19163 - DNA, 23 bp, Artificial Sequence
  Description of Artificial Sequence: Synthetic primer
gcgaagttcaaccatatgtagcg

SEQ ID NO: 19164 - DNA, 24 bp, Artificial Sequence
  Description of Artificial Sequence: Synthetic primer
ggacaaaaatatcagcctgggcta

SEQ ID NO: 19165 - DNA, 23 bp, Artificial Sequence
  Description of Artificial Sequence: Synthetic primer
gggcatcagcaagaaattccttc

SEQ ID NO: 19166 - DNA, 25 bp, Artificial Sequence
  Description of Artificial Sequence: Synthetic primer
caaacctcctcctatgatacccatc

SEQ ID NO: 19167 - DNA, 24 bp, Artificial Sequence
  Description of Artificial Sequence: Synthetic primer
acagactattacatggcgatgctg

SEQ ID NO: 19168 - DNA, 21 bp, Artificial Sequence
  Description of Artificial Sequence: Synthetic primer
gctaattttggagcgaaggca

SEQ ID NO: 19169 - DNA, 21 bp, Artificial Sequence
  Description of Artificial Sequence: Synthetic primer
cagggaaacaccgcatcattt

SEQ ID NO: 19170 - DNA, 23 bp, Artificial Sequence
  Description of Artificial Sequence: Synthetic primer
gtgaattttcacaagaggtgcca

SEQ ID NO: 19171 - DNA, 21 bp, Artificial Sequence
  Description of Artificial Sequence: Synthetic primer
aaagtccactcagccgttagc

SEQ ID NO: 19172 - DNA, 27 bp, Artificial Sequence
  Description of Artificial Sequence: Synthetic primer
atatgtttttctccacctcgctaatga

SEQ ID NO: 19173 - DNA, 20 bp, Artificial Sequence
  Description of Artificial Sequence: Synthetic primer
ctcggtgagctccatctcag

SEQ ID NO: 19174 - DNA, 21 bp, Artificial Sequence
  Description of Artificial Sequence: Synthetic primer
tccgtttgctaccttttccca

SEQ ID NO: 19175 - DNA, 21 bp, Artificial Sequence
  Description of Artificial Sequence: Synthetic primer
ggttgctccttgatgggatga

SEQ ID NO: 19176 - DNA, 23 bp, Artificial Sequence
  Description of Artificial Sequence: Synthetic primer
tggttctgaaaatccatcaacgc

SEQ ID NO: 19177 - DNA, 20 bp, Artificial Sequence
  Description of Artificial Sequence: Synthetic primer
gctggatgatctccttgcca

SEQ ID NO: 19178 - DNA, 28 bp, Artificial Sequence
  Description of Artificial Sequence: Synthetic primer
cgaactgctactctaaatttgtttgcag

SEQ ID NO: 19179 - DNA, 28 bp, Artificial Sequence
  Description of Artificial Sequence: Synthetic primer
agtgatgaaaattatacccccagacaaa

SEQ ID NO: 19180 - DNA, 21 bp, Artificial Sequence
  Description of Artificial Sequence: Synthetic primer
gttgcagttggatgctcagtt

SEQ ID NO: 19181 - DNA, 21 bp, Artificial Sequence
  Description of Artificial Sequence: Synthetic primer
catgtgctctcaacaccctct

SEQ ID NO: 19182 - DNA, 24 bp, Artificial Sequence
  Description of Artificial Sequence: Synthetic primer
agctctaagatcctaaaccgagca

SEQ ID NO: 19183 - DNA, 26 bp, Artificial Sequence
  Description of Artificial Sequence: Synthetic primer
agatgtcgataccttcaggaaagtac

SEQ ID NO: 19184 - DNA, 21 bp, Artificial Sequence
  Description of Artificial Sequence: Synthetic primer
actcagcctgtatggcctcta

SEQ ID NO: 19185 - DNA, 21 bp, Artificial Sequence
  Description of Artificial Sequence: Synthetic primer
gtgcaggaagttggtggtcat

SEQ ID NO: 19186 - DNA, 21 bp, Artificial Sequence
  Description of Artificial Sequence: Synthetic primer
tggccacaaaaagtctgcaat

SEQ ID NO: 19187 - DNA, 26 bp, Artificial Sequence
  Description of Artificial Sequence: Synthetic primer
tcgagtatgtcattgctagatgcttt

SEQ ID NO: 19188 - DNA, 28 bp, Artificial Sequence
  Description of Artificial Sequence: Synthetic primer
ctatcagtccatcttccaaggtataacc

SEQ ID NO: 19189 - DNA, 28 bp, Artificial Sequence
  Description of Artificial Sequence: Synthetic primer
ggctttcgtgtgtattttctttctccta

SEQ ID NO: 19190 - DNA, 22 bp, Artificial Sequence
  Description of Artificial Sequence: Synthetic primer
gggtcaagtacaccatgagagc

SEQ ID NO: 19191 - DNA, 21 bp, Artificial Sequence
  Description of Artificial Sequence: Synthetic primer
atgtcttcgaatggtcagcgt

SEQ ID NO: 19192 - DNA, 23 bp, Artificial Sequence
  Description of Artificial Sequence: Synthetic primer
agtcttgaaattctgggagccat

SEQ ID NO: 19193 - DNA, 27 bp, Artificial Sequence
  Description of Artificial Sequence: Synthetic primer
tcattaaggtaggtggtaagaggaaga

SEQ ID NO: 19194 - DNA, 23 bp, Artificial Sequence
  Description of Artificial Sequence: Synthetic primer
tcctccatcaaactgaagcaagt

SEQ ID NO: 19195 - DNA, 23 bp, Artificial Sequence
  Description of Artificial Sequence: Synthetic primer
acgtttcgaatggaggatgatct

SEQ ID NO: 19196 - DNA, 21 bp, Artificial Sequence
  Description of Artificial Sequence: Synthetic primer
aacccatctgatgtcgtgtgt

SEQ ID NO: 19197 - DNA, 25 bp, Artificial Sequence
  Description of Artificial Sequence: Synthetic primer
tgggatagacgatggatcaactagg

SEQ ID NO: 19198 - DNA, 24 bp, Artificial Sequence
  Description of Artificial Sequence: Synthetic primer
cgggtatgtattagcttcactgga

SEQ ID NO: 19199 - DNA, 23 bp, Artificial Sequence
  Description of Artificial Sequence: Synthetic primer
ctgctcaatgcaggattctaagc

SEQ ID NO: 19200 - DNA, 24 bp, Artificial Sequence
  Description of Artificial Sequence: Synthetic primer
aggcagatgtgaaatcgctatagt

SEQ ID NO: 19201 - DNA, 22 bp, Artificial Sequence
  Description of Artificial Sequence: Synthetic primer
ctcagaccaacgatggtttgga

SEQ ID NO: 19202 - DNA, 24 bp, Artificial Sequence
  Description of Artificial Sequence: Synthetic primer
tccaaaatcaggtcatcctgtgtt

SEQ ID NO: 19203 - DNA, 25 bp, Artificial Sequence
  Description of Artificial Sequence: Synthetic primer
cctttattttcactggatgccttgg

SEQ ID NO: 19204 - DNA, 22 bp, Artificial Sequence
  Description of Artificial Sequence: Synthetic primer
agcaagtcgctaaaagcacaag

SEQ ID NO: 19205 - DNA, 21 bp, Artificial Sequence
  Description of Artificial Sequence: Synthetic primer
ggtagcttcacgtctctgagc

SEQ ID NO: 19206 - DNA, 22 bp, Artificial Sequence
  Description of Artificial Sequence: Synthetic primer
gcacttgtggacaacacaaagt

SEQ ID NO: 19207 - DNA, 28 bp, Artificial Sequence
  Description of Artificial Sequence: Synthetic primer
ggtaaatagctcgtctcttacaatcctt

SEQ ID NO: 19208 - DNA, 28 bp, Artificial Sequence
  Description of Artificial Sequence: Synthetic primer
gttcaaatgctcagatagtttgtctctc

SEQ ID NO: 19209 - DNA, 26 bp, Artificial Sequence
  Description of Artificial Sequence: Synthetic primer
ctgaaggtctcatcagtacagtacaa

SEQ ID NO: 19210 - DNA, 24 bp, Artificial Sequence
  Description of Artificial Sequence: Synthetic primer
tcttctagacaacaatgccacacc

SEQ ID NO: 19211 - DNA, 21 bp, Artificial Sequence
  Description of Artificial Sequence: Synthetic primer
gcaagctgtggccaagtattt

SEQ ID NO: 19212 - DNA, 21 bp, Artificial Sequence
  Description of Artificial Sequence: Synthetic primer
tcatcgtctgggtcttcatcc

SEQ ID NO: 19213 - DNA, 28 bp, Artificial Sequence
  Description of Artificial Sequence: Synthetic primer
tgactttcagataataggacaccaaaca

SEQ ID NO: 19214 - DNA, 21 bp, Artificial Sequence
  Description of Artificial Sequence: Synthetic primer
tatcatggaccacaggctcac

SEQ ID NO: 19215 - DNA, 21 bp, Artificial Sequence
  Description of Artificial Sequence: Synthetic primer
catgctcgtcagagctggtaa

SEQ ID NO: 19216 - DNA, 23 bp, Artificial Sequence
  Description of Artificial Sequence: Synthetic primer
acacacaagtgagaccaacatca

SEQ ID NO: 19217 - DNA, 21 bp, Artificial Sequence
  Description of Artificial Sequence: Synthetic primer
ttgatgagagtgtggcctcca

SEQ ID NO: 19218 - DNA, 21 bp, Artificial Sequence
  Description of Artificial Sequence: Synthetic primer
cgagccgtcaacatctgcata

SEQ ID NO: 19219 - DNA, 21 bp, Artificial Sequence
  Description of Artificial Sequence: Synthetic primer
ctagcgatgcatggttttggg

SEQ ID NO: 19220 - DNA, 21 bp, Artificial Sequence
  Description of Artificial Sequence: Synthetic primer
ctgagcggtgtttttcctgtc

SEQ ID NO: 19221 - DNA, 22 bp, Artificial Sequence
  Description of Artificial Sequence: Synthetic primer
gcagagatatcctcccaccatg

SEQ ID NO: 19222 - DNA, 26 bp, Artificial Sequence
  Description of Artificial Sequence: Synthetic primer
gcaaactctcaagcagaacatttttg

SEQ ID NO: 19223 - DNA, 26 bp, Artificial Sequence
  Description of Artificial Sequence: Synthetic primer
gttcaacacacaacatcaaatgcaaa

SEQ ID NO: 19224 - DNA, 21 bp, Artificial Sequence
  Description of Artificial Sequence: Synthetic primer
ctgcacacttgtctggtaccg

SEQ ID NO: 19225 - DNA, 22 bp, Artificial Sequence
  Description of Artificial Sequence: Synthetic primer
gaccgagtcctggtttaaagga

SEQ ID NO: 19226 - DNA, 21 bp, Artificial Sequence
  Description of Artificial Sequence: Synthetic primer
ccaaactacaagcctggtgga

SEQ ID NO: 19227 - DNA, 21 bp, Artificial Sequence
  Description of Artificial Sequence: Synthetic primer
accacctcctcaagcataggc

SEQ ID NO: 19228 - DNA, 26 bp, Artificial Sequence
  Description of Artificial Sequence: Synthetic primer
ctgatgacctcgaaaatcatgttcaa

SEQ ID NO: 19229 - DNA, 21 bp, Artificial Sequence
  Description of Artificial Sequence: Synthetic primer
tctcagcatccagtgctttct

SEQ ID NO: 19230 - DNA, 18 bp, Artificial Sequence
  Description of Artificial Sequence: Synthetic primer
gacgaggcggcgttcttg

SEQ ID NO: 19231 - DNA, 28 bp, Artificial Sequence
  Description of Artificial Sequence: Synthetic primer
aggcatcatcttaacacaagcataatct

SEQ ID NO: 19232 - DNA, 21 bp, Artificial Sequence
  Description of Artificial Sequence: Synthetic primer
caggcttggctcactcatcag

SEQ ID NO: 19233 - DNA, 22 bp, Artificial Sequence
  Description of Artificial Sequence: Synthetic primer
tgtaacactagcaagcaatggc

SEQ ID NO: 19234 - DNA, 22 bp, Artificial Sequence
  Description of Artificial Sequence: Synthetic primer
tcacctcattgatcagctcctg

SEQ ID NO: 19235 - DNA, 21 bp, Artificial Sequence
  Description of Artificial Sequence: Synthetic primer
atatgacgtgcttgcttcgga

SEQ ID NO: 19236 - DNA, 29 bp, Artificial Sequence
  Description of Artificial Sequence: Synthetic primer
gtttacaaaattttcgccaacaacatgaa

SEQ ID NO: 19237 - DNA, 27 bp, Artificial Sequence
  Description of Artificial Sequence: Synthetic primer
gcatacttcttagccacagacttatca

SEQ ID NO: 19238 - DNA, 24 bp, Artificial Sequence
  Description of Artificial Sequence: Synthetic primer
tcatcacaatccacctacagacag

SEQ ID NO: 19239 - DNA, 24 bp, Artificial Sequence
  Description of Artificial Sequence: Synthetic primer
gcttccatcgtctcataaaccttg

SEQ ID NO: 19240 - DNA, 21 bp, Artificial Sequence
  Description of Artificial Sequence: Synthetic primer
cctgatcagcttcaagtgcag

SEQ ID NO: 19241 - DNA, 22 bp, Artificial Sequence
  Description of Artificial Sequence: Synthetic primer
gcaatggctgtctggaacagta

SEQ ID NO: 19242 - DNA, 21 bp, Artificial Sequence
  Description of Artificial Sequence: Synthetic primer
tccctcactatttcccccaca

SEQ ID NO: 19243 - DNA, 21 bp, Artificial Sequence
  Description of Artificial Sequence: Synthetic primer
gttgcaaaagtagccggagga

SEQ ID NO: 19244 - DNA, 19 bp, Artificial Sequence
  Description of Artificial Sequence: Synthetic primer
gccaggcccatggatactc

SEQ ID NO: 19245 - DNA, 23 bp, Artificial Sequence
  Description of Artificial Sequence: Synthetic primer
tgcttgcttgtggatgaaaatgt

SEQ ID NO: 19246 - DNA, 28 bp, Artificial Sequence
  Description of Artificial Sequence: Synthetic primer
acaaaactaggcatttaagaaacaaccc

SEQ ID NO: 19247 - DNA, 27 bp, Artificial Sequence
  Description of Artificial Sequence: Synthetic primer
gtcttcactgacagcaagtaacaattt

SEQ ID NO: 19248 - DNA, 29 bp, Artificial Sequence
  Description of Artificial Sequence: Synthetic primer
tggttattgtgaatgatcttattgccagt

SEQ ID NO: 19249 - DNA, 23 bp, Artificial Sequence
  Description of Artificial Sequence: Synthetic primer
ccaaatcaacgtcttgggagaca

SEQ ID NO: 19250 - DNA, 28 bp, Artificial Sequence
  Description of Artificial Sequence: Synthetic primer
ctcctgacaaaacaattaccactacatc

SEQ ID NO: 19251 - DNA, 22 bp, Artificial Sequence
  Description of Artificial Sequence: Synthetic primer
actcgcagtctagttccttcac

SEQ ID NO: 19252 - DNA, 21 bp, Artificial Sequence
  Description of Artificial Sequence: Synthetic primer
cttctggtggaactgcttcct

SEQ ID NO: 19253 - DNA, 24 bp, Artificial Sequence
  Description of Artificial Sequence: Synthetic primer
tctctcgatgcatcttcttcagac

SEQ ID NO: 19254 - DNA, 21 bp, Artificial Sequence
  Description of Artificial Sequence: Synthetic primer
gtcccactagggacccctatc

SEQ ID NO: 19255 - DNA, 24 bp, Artificial Sequence
  Description of Artificial Sequence: Synthetic primer
ccaccttggtatccaggattgcta

SEQ ID NO: 19256 - DNA, 21 bp, Artificial Sequence
  Description of Artificial Sequence: Synthetic primer
caatctacctggccctggatc

SEQ ID NO: 19257 - DNA, 21 bp, Artificial Sequence
  Description of Artificial Sequence: Synthetic primer
cggctgttgcatcatccatac

SEQ ID NO: 19258 - DNA, 21 bp, Artificial Sequence
  Description of Artificial Sequence: Synthetic primer
cctgcctcaactgacctcttg

SEQ ID NO: 19259 - DNA, 23 bp, Artificial Sequence
  Description of Artificial Sequence: Synthetic primer
gccgtgatttcatcctcatacca

SEQ ID NO: 19260 - DNA, 26 bp, Artificial Sequence
  Description of Artificial Sequence: Synthetic primer
tcattacagccaccttcttagattcc

SEQ ID NO: 19261 - DNA, 26 bp, Artificial Sequence
  Description of Artificial Sequence: Synthetic primer
cagatcaaaagtaacacttgcaacct

SEQ ID NO: 19262 - DNA, 23 bp, Artificial Sequence
  Description of Artificial Sequence: Synthetic primer
aatttgtctaggccactcagttg

SEQ ID NO: 19263 - DNA, 21 bp, Artificial Sequence
  Description of Artificial Sequence: Synthetic primer
tggagctttggtgttgagagg

SEQ ID NO: 19264 - DNA, 21 bp, Artificial Sequence
  Description of Artificial Sequence: Synthetic primer
cggctgcaaagcttatgcttc

SEQ ID NO: 19265 - DNA, 21 bp, Artificial Sequence
  Description of Artificial Sequence: Synthetic primer
tccttgccgttgacatcaacc

SEQ ID NO: 19266 - DNA, 25 bp, Artificial Sequence
  Description of Artificial Sequence: Synthetic primer
cagtaatgtgttgccagtgataacc

SEQ ID NO: 19267 - DNA, 26 bp, Artificial Sequence
  Description of Artificial Sequence: Synthetic primer
gtcaaaacttgagtaccaatcagagc

SEQ ID NO: 19268 - DNA, 22 bp, Artificial Sequence
  Description of Artificial Sequence: Synthetic primer
gtgttgggtgagacaagtcact

SEQ ID NO: 19269 - DNA, 23 bp, Artificial Sequence
  Description of Artificial Sequence: Synthetic primer
catacggatgcttggaggctaat

SEQ ID NO: 19270 - DNA, 21 bp, Artificial Sequence
  Description of Artificial Sequence: Synthetic primer
ctgtccatccacaccagttct

SEQ ID NO: 19271 - DNA, 21 bp, Artificial Sequence
  Description of Artificial Sequence: Synthetic primer
gcctgcttgaacccatgagat

SEQ ID NO: 19272 - DNA, 23 bp, Artificial Sequence
  Description of Artificial Sequence: Synthetic primer
cccccttcttcgaatcctgtatg

SEQ ID NO: 19273 - DNA, 24 bp, Artificial Sequence
  Description of Artificial Sequence: Synthetic primer
attatgcggactgttgtgctatct

SEQ ID NO: 19274 - DNA, 23 bp, Artificial Sequence
  Description of Artificial Sequence: Synthetic primer
cgagagcccatctatgcaaactt

SEQ ID NO: 19275 - DNA, 24 bp, Artificial Sequence
  Description of Artificial Sequence: Synthetic primer
gtttatttgggactgctgtgcatt

SEQ ID NO: 19276 - DNA, 18 bp, Artificial Sequence
  Description of Artificial Sequence: Synthetic primer
gctggtcagggttttcgg

SEQ ID NO: 19277 - DNA, 21 bp, Artificial Sequence
  Description of Artificial Sequence: Synthetic primer
gtctctgtgcgcacaataacc

SEQ ID NO: 19278 - DNA, 21 bp, Artificial Sequence
  Description of Artificial Sequence: Synthetic primer
cagaaccctcccatccacatg

SEQ ID NO: 19279 - DNA, 24 bp, Artificial Sequence
  Description of Artificial Sequence: Synthetic primer
gcagatgtacggagtcatctttga

SEQ ID NO: 19280 - DNA, 19 bp, Artificial Sequence
  Description of Artificial Sequence: Synthetic primer
tcctcgaggaactgcctct

SEQ ID NO: 19281 - DNA, 21 bp, Artificial Sequence
  Description of Artificial Sequence: Synthetic primer
atgcggtctgctactctgatg

SEQ ID NO: 19282 - DNA, 28 bp, Artificial Sequence
  Description of Artificial Sequence: Synthetic primer
acaaaattcaatacactcctcctcatgt

SEQ ID NO: 19283 - DNA, 28 bp, Artificial Sequence
  Description of Artificial Sequence: Synthetic primer
ccgtcgaggtctattataagaacaactg

SEQ ID NO: 19284 - DNA, 28 bp, Artificial Sequence
  Description of Artificial Sequence: Synthetic primer
cctatctccattttcttcttaagtgcct

SEQ ID NO: 19285 - DNA, 30 bp, Artificial Sequence
  Description of Artificial Sequence: Synthetic primer
gtaaaattcagtcatcactacacacaacac

SEQ ID NO: 19286 - DNA, 21 bp, Artificial Sequence
  Description of Artificial Sequence: Synthetic primer
tgggccaatcagatcttccat

SEQ ID NO: 19287 - DNA, 25 bp, Artificial Sequence
  Description of Artificial Sequence: Synthetic primer
cggattttgtatgctgctgatcttt

SEQ ID NO: 19288 - DNA, 21 bp, Artificial Sequence
  Description of Artificial Sequence: Synthetic primer
cccaactccactcctccttct

SEQ ID NO: 19289 - DNA, 25 bp, Artificial Sequence
  Description of Artificial Sequence: Synthetic primer
acaaacaagcagcagaatgtctaag

SEQ ID NO: 19290 - DNA, 19 bp, Artificial Sequence
  Description of Artificial Sequence: Synthetic primer
ccacagcactagggtggtc

SEQ ID NO: 19291 - DNA, 23 bp, Artificial Sequence
  Description of Artificial Sequence: Synthetic primer
cgttgtttatggcatcgtagacc

SEQ ID NO: 19292 - DNA, 25 bp, Artificial Sequence
  Description of Artificial Sequence: Synthetic primer
gccatcatgaacacattcaaatgct

SEQ ID NO: 19293 - DNA, 21 bp, Artificial Sequence
  Description of Artificial Sequence: Synthetic primer
agcaaacctctgtgggttgaa

SEQ ID NO: 19294 - DNA, 28 bp, Artificial Sequence
  Description of Artificial Sequence: Synthetic primer
ctccttcttctcttccttcttttcttca

SEQ ID NO: 19295 - DNA, 28 bp, Artificial Sequence
  Description of Artificial Sequence: Synthetic primer
gggagaggaaaaataaattatgggcaaa

SEQ ID NO: 19296 - DNA, 28 bp, Artificial Sequence
  Description of Artificial Sequence: Synthetic primer
tgtactacagttttacaatggcaaatcg

SEQ ID NO: 19297 - DNA, 21 bp, Artificial Sequence
  Description of Artificial Sequence: Synthetic primer
ctatggttcccagcgccaata

SEQ ID NO: 19298 - DNA, 26 bp, Artificial Sequence
  Description of Artificial Sequence: Synthetic primer
ggtaaattcagaaacagctaccagca

SEQ ID NO: 19299 - DNA, 24 bp, Artificial Sequence
  Description of Artificial Sequence: Synthetic primer
tgatttgttccatggtcttcagca

SEQ ID NO: 19300 - DNA, 28 bp, Artificial Sequence
  Description of Artificial Sequence: Synthetic primer
catcatactgaaataatgtctccagcca

SEQ ID NO: 19301 - DNA, 21 bp, Artificial Sequence
  Description of Artificial Sequence: Synthetic primer
cgcctaggttctccttcatcc

SEQ ID NO: 19302 - DNA, 23 bp, Artificial Sequence
  Description of Artificial Sequence: Synthetic primer
caccagttttgactgaggcaaat

SEQ ID NO: 19303 - DNA, 22 bp, Artificial Sequence
  Description of Artificial Sequence: Synthetic primer
agctgcctttctagcatcaaca

SEQ ID NO: 19304 - DNA, 21 bp, Artificial Sequence
  Description of Artificial Sequence: Synthetic primer
gcactggatgggatcaggaaa

SEQ ID NO: 19305 - DNA, 26 bp, Artificial Sequence
  Description of Artificial Sequence: Synthetic primer
ctgttcagaaatgagatccttgcttg

SEQ ID NO: 19306 - DNA, 23 bp, Artificial Sequence
  Description of Artificial Sequence: Synthetic primer
ttttgcttttggaggaactctgg

SEQ ID NO: 19307 - DNA, 23 bp, Artificial Sequence
  Description of Artificial Sequence: Synthetic primer
tgctcccaggaccatacaaatac

SEQ ID NO: 19308 - DNA, 25 bp, Artificial Sequence
  Description of Artificial Sequence: Synthetic primer
actgtagtaggcataacaagaccgt

SEQ ID NO: 19309 - DNA, 23 bp, Artificial Sequence
  Description of Artificial Sequence: Synthetic primer
gttgtatttatgctgccatggct

SEQ ID NO: 19310 - DNA, 21 bp, Artificial Sequence
  Description of Artificial Sequence: Synthetic primer
ggatcacagccacttgtcgaa

SEQ ID NO: 19311 - DNA, 27 bp, Artificial Sequence
  Description of Artificial Sequence: Synthetic primer
acaaagagtaatgaggacaggaaaagg

SEQ ID NO: 19312 - DNA, 22 bp, Artificial Sequence
  Description of Artificial Sequence: Synthetic primer
tccaagcagtagctattgccat

SEQ ID NO: 19313 - DNA, 21 bp, Artificial Sequence
  Description of Artificial Sequence: Synthetic primer
atcagccagaacccgtactct

SEQ ID NO: 19314 - DNA, 24 bp, Artificial Sequence
  Description of Artificial Sequence: Synthetic primer
acatgcaagcagaatcataaccac

SEQ ID NO: 19315 - DNA, 22 bp, Artificial Sequence
  Description of Artificial Sequence: Synthetic primer
cagcatgtccaagtacctggaa

SEQ ID NO: 19316 - DNA, 27 bp, Artificial Sequence
  Description of Artificial Sequence: Synthetic primer
tgaattacaaaaatggctgaaccaaca

SEQ ID NO: 19317 - DNA, 27 bp, Artificial Sequence
  Description of Artificial Sequence: Synthetic primer
accacttttctggtcatcatcagattt

SEQ ID NO: 19318 - DNA, 21 bp, Artificial Sequence
  Description of Artificial Sequence: Synthetic primer
gatggcttctctgatgttgcg

SEQ ID NO: 19319 - DNA, 23 bp, Artificial Sequence
  Description of Artificial Sequence: Synthetic primer
ttgaaaatgcacgacaaatgtgc

SEQ ID NO: 19320 - DNA, 21 bp, Artificial Sequence
  Description of Artificial Sequence: Synthetic primer
gctcagcaaccttaccgaaca

SEQ ID NO: 19321 - DNA, 21 bp, Artificial Sequence
  Description of Artificial Sequence: Synthetic primer
agcctcattgttgatcatgcg

SEQ ID NO: 19322 - DNA, 26 bp, Artificial Sequence
  Description of Artificial Sequence: Synthetic primer
tcctagaagtttctgcgatgatcatt

SEQ ID NO: 19323 - DNA, 28 bp, Artificial Sequence
  Description of Artificial Sequence: Synthetic primer
agttttatcttcagctacagctaccttg

SEQ ID NO: 19324 - DNA, 21 bp, Artificial Sequence
  Description of Artificial Sequence: Synthetic primer
gcgatgtcgaacgatctggag

SEQ ID NO: 19325 - DNA, 27 bp, Artificial Sequence
  Description of Artificial Sequence: Synthetic primer
caactttgacaacatcgtgcagataaa

SEQ ID NO: 19326 - DNA, 27 bp, Artificial Sequence
  Description of Artificial Sequence: Synthetic primer
atcatggaatggtggataaagttgtga

SEQ ID NO: 19327 - DNA, 19 bp, Artificial Sequence
  Description of Artificial Sequence: Synthetic primer
caggacgagctcgttcagg

SEQ ID NO: 19328 - DNA, 20 bp, Artificial Sequence
  Description of Artificial Sequence: Synthetic primer
gggatggacagagtcccaga

SEQ ID NO: 19329 - DNA, 26 bp, Artificial Sequence
  Description of Artificial Sequence: Synthetic primer
caacccaagcagaaaatgaaaactga

SEQ ID NO: 19330 - DNA, 21 bp, Artificial Sequence
  Description of Artificial Sequence: Synthetic primer
ccttgagcctgtccaatccat

SEQ ID NO: 19331 - DNA, 25 bp, Artificial Sequence
  Description of Artificial Sequence: Synthetic primer
aaatcagccatcctttgtttctctg

SEQ ID NO: 19332 - DNA, 23 bp, Artificial Sequence
  Description of Artificial Sequence: Synthetic primer
actctatggtgaatttgcatgcg

SEQ ID NO: 19333 - DNA, 22 bp, Artificial Sequence
  Description of Artificial Sequence: Synthetic primer
agaagctttgctttcaggctct

SEQ ID NO: 19334 - DNA, 21 bp, Artificial Sequence
  Description of Artificial Sequence: Synthetic primer
acggctctggactgtacagta

SEQ ID NO: 19335 - DNA, 23 bp, Artificial Sequence
  Description of Artificial Sequence: Synthetic primer
tgatcgacacttactccatgctc

SEQ ID NO: 19336 - DNA, 23 bp, Artificial Sequence
  Description of Artificial Sequence: Synthetic primer
aaacagctgttcctctgtactca

SEQ ID NO: 19337 - DNA, 28 bp, Artificial Sequence
  Description of Artificial Sequence: Synthetic primer
tctggtcgcaattataatgtatacacca

SEQ ID NO: 19338 - DNA, 26 bp, Artificial Sequence
  Description of Artificial Sequence: Synthetic primer
caatatcacgattagtccaacctcgt

SEQ ID NO: 19339 - DNA, 21 bp, Artificial Sequence
  Description of Artificial Sequence: Synthetic primer
gagtgaagctaccgaccttgg

SEQ ID NO: 19340 - DNA, 20 bp, Artificial Sequence
  Description of Artificial Sequence: Synthetic primer
cccttcgaaagcatccaacg

SEQ ID NO: 19341 - DNA, 21 bp, Artificial Sequence
  Description of Artificial Sequence: Synthetic primer
ccctgtctccttgaagagctg

SEQ ID NO: 19342 - DNA, 24 bp, Artificial Sequence
  Description of Artificial Sequence: Synthetic primer
cattatgggatgagcctctgaagt

SEQ ID NO: 19343 - DNA, 26 bp, Artificial Sequence
  Description of Artificial Sequence: Synthetic primer
aaataagcttctctcccttcacttga

SEQ ID NO: 19344 - DNA, 21 bp, Artificial Sequence
  Description of Artificial Sequence: Synthetic primer
tcgcgttctgaccatgtatga

SEQ ID NO: 19345 - DNA, 22 bp, Artificial Sequence
  Description of Artificial Sequence: Synthetic primer
attcttctgatactggcgagca

SEQ ID NO: 19346 - DNA, 24 bp, Artificial Sequence
  Description of Artificial Sequence: Synthetic primer
actgaagcttaaggttgagatggc

SEQ ID NO: 19347 - DNA, 26 bp, Artificial Sequence
  Description of Artificial Sequence: Synthetic primer
cgcaagcagttcttgatcaatttcat

SEQ ID NO: 19348 - DNA, 21 bp, Artificial Sequence
  Description of Artificial Sequence: Synthetic primer
atgaccgccttgaagaagagg

SEQ ID NO: 19349 - DNA, 26 bp, Artificial Sequence
  Description of Artificial Sequence: Synthetic primer
gggagatggaccattattagtgatgc

SEQ ID NO: 19350 - DNA, 21 bp, Artificial Sequence
  Description of Artificial Sequence: Synthetic primer
ctgctgacaaggacagactcg

SEQ ID NO: 19351 - DNA, 21 bp, Artificial Sequence
  Description of Artificial Sequence: Synthetic primer
atcaatggttgcccgttgtgt

SEQ ID NO: 19352 - DNA, 23 bp, Artificial Sequence
  Description of Artificial Sequence: Synthetic primer
catgacaatctcgaggaaaacgg

SEQ ID NO: 19353 - DNA, 21 bp, Artificial Sequence
  Description of Artificial Sequence: Synthetic primer
ttgccacatcagttgcctcag

SEQ ID NO: 19354 - DNA, 24 bp, Artificial Sequence
  Description of Artificial Sequence: Synthetic primer
tctgcttccagcgtcttagaattt

SEQ ID NO: 19355 - DNA, 21 bp, Artificial Sequence
  Description of Artificial Sequence: Synthetic primer
atcatgaagagcgcgtgtagc

SEQ ID NO: 19356 - DNA, 24 bp, Artificial Sequence
  Description of Artificial Sequence: Synthetic primer
aggcaacttagatacagactgtcc

SEQ ID NO: 19357 - DNA, 22 bp, Artificial Sequence
  Description of Artificial Sequence: Synthetic primer
gttcggtcttgccaatgtcttc

SEQ ID NO: 19358 - DNA, 21 bp, Artificial Sequence
  Description of Artificial Sequence: Synthetic primer
ccatcacctgctctaccgttg

SEQ ID NO: 19359 - DNA, 21 bp, Artificial Sequence
  Description of Artificial Sequence: Synthetic primer
gttgattgcagacccgctttg

SEQ ID NO: 19360 - DNA, 23 bp, Artificial Sequence
  Description of Artificial Sequence: Synthetic primer
tttgctcagatggagcttccttt

SEQ ID NO: 19361 - DNA, 28 bp, Artificial Sequence
  Description of Artificial Sequence: Synthetic primer
actatctgaactgcaaactcactagatc

SEQ ID NO: 19362 - DNA, 23 bp, Artificial Sequence
  Description of Artificial Sequence: Synthetic primer
gtacgtcactgctccatctctac

SEQ ID NO: 19363 - DNA, 25 bp, Artificial Sequence
  Description of Artificial Sequence: Synthetic primer
ggcatatggaaggactaaaagcatg

SEQ ID NO: 19364 - DNA, 28 bp, Artificial Sequence
  Description of Artificial Sequence: Synthetic primer
acaaagcttacacaagatttcagatctc

SEQ ID NO: 19365 - DNA, 25 bp, Artificial Sequence
  Description of Artificial Sequence: Synthetic primer
ttgtcaatctgcaacgaatctttca

SEQ ID NO: 19366 - DNA, 19 bp, Artificial Sequence
  Description of Artificial Sequence: Synthetic primer
ctccagcgcttctggtctg

SEQ ID NO: 19367 - DNA, 28 bp, Artificial Sequence
  Description of Artificial Sequence: Synthetic primer
agaattgaactgtttttggagtgtgaac

SEQ ID NO: 19368 - DNA, 21 bp, Artificial Sequence
  Description of Artificial Sequence: Synthetic primer
cgatctcgtgagcacacttcc

SEQ ID NO: 19369 - DNA, 23 bp, Artificial Sequence
  Description of Artificial Sequence: Synthetic primer
aacaaatggcaccaactgacaaa

SEQ ID NO: 19370 - DNA, 21 bp, Artificial Sequence
  Description of Artificial Sequence: Synthetic primer
atttctgtcctggagcttgcc

SEQ ID NO: 19371 - DNA, 24 bp, Artificial Sequence
  Description of Artificial Sequence: Synthetic primer
gtttgaactcatatggaccagcct

SEQ ID NO: 19372 - DNA, 21 bp, Artificial Sequence
  Description of Artificial Sequence: Synthetic primer
aacctctgtcgcggtaaatga

SEQ ID NO: 19373 - DNA, 22 bp, Artificial Sequence
  Description of Artificial Sequence: Synthetic primer
cttgtaggtgctgcttcactgg

SEQ ID NO: 19374 - DNA, 21 bp, Artificial Sequence
  Description of Artificial Sequence: Synthetic primer
tttcgatgtccccactcccta

SEQ ID NO: 19375 - DNA, 23 bp, Artificial Sequence
  Description of Artificial Sequence: Synthetic primer
tgacagtttacaccagggaatgg

SEQ ID NO: 19376 - DNA, 26 bp, Artificial Sequence
  Description of Artificial Sequence: Synthetic primer
ctactatacatcttgggcttgtggag

SEQ ID NO: 19377 - DNA, 22 bp, Artificial Sequence
  Description of Artificial Sequence: Synthetic primer
gcagataggcaaggaagatgct

SEQ ID NO: 19378 - DNA, 21 bp, Artificial Sequence
  Description of Artificial Sequence: Synthetic primer
agatgtcgacaaggtgcctac

SEQ ID NO: 19379 - DNA, 28 bp, Artificial Sequence
  Description of Artificial Sequence: Synthetic primer
tgttgcatatgctactacagagagaaaa

SEQ ID NO: 19380 - DNA, 27 bp, Artificial Sequence
  Description of Artificial Sequence: Synthetic primer
agagatcaaaggattcttcaggaatgg

SEQ ID NO: 19381 - DNA, 23 bp, Artificial Sequence
  Description of Artificial Sequence: Synthetic primer
tgtaccggtagttcagaaagagc

SEQ ID NO: 19382 - DNA, 21 bp, Artificial Sequence
  Description of Artificial Sequence: Synthetic primer
aggtcgcttgttcaagcgtta

SEQ ID NO: 19383 - DNA, 28 bp, Artificial Sequence
  Description of Artificial Sequence: Synthetic primer
cctagtaattttcagggaattgccattg

SEQ ID NO: 19384 - DNA, 21 bp, Artificial Sequence
  Description of Artificial Sequence: Synthetic primer
attccctagcctgttgcatcc

SEQ ID NO: 19385 - DNA, 22 bp, Artificial Sequence
  Description of Artificial Sequence: Synthetic primer
gtgtcgcatcttatccatgtgc

SEQ ID NO: 19386 - DNA, 21 bp, Artificial Sequence
  Description of Artificial Sequence: Synthetic primer
ggcctggtttcttaggagagg

SEQ ID NO: 19387 - DNA, 23 bp, Artificial Sequence
  Description of Artificial Sequence: Synthetic primer
ggctgtttgagcatttgaacaca

SEQ ID NO: 19388 - DNA, 21 bp, Artificial Sequence
  Description of Artificial Sequence: Synthetic primer
tagttgggacatgtccaagcc

SEQ ID NO: 19389 - DNA, 23 bp, Artificial Sequence
  Description of Artificial Sequence: Synthetic primer
ccgatatcgcccctactagttct

SEQ ID NO: 19390 - DNA, 21 bp, Artificial Sequence
  Description of Artificial Sequence: Synthetic primer
ggtaggctgttcgcaactgat

SEQ ID NO: 19391 - DNA, 24 bp, Artificial Sequence
  Description of Artificial Sequence: Synthetic primer
gctactctttgactgctacggatt

SEQ ID NO: 19392 - DNA, 25 bp, Artificial Sequence
  Description of Artificial Sequence: Synthetic primer
atacagagtacaccaagagcaagag

SEQ ID NO: 19393 - DNA, 25 bp, Artificial Sequence
  Description of Artificial Sequence: Synthetic primer
agctggcgtaaatattacgttcatg

SEQ ID NO: 19394 - DNA, 26 bp, Artificial Sequence
  Description of Artificial Sequence: Synthetic primer
cagatatgaagaagcccaatacagga

SEQ ID NO: 19395 - DNA, 22 bp, Artificial Sequence
  Description of Artificial Sequence: Synthetic primer
gccacaatatacgccgaagaga

SEQ ID NO: 19396 - DNA, 22 bp, Artificial Sequence
  Description of Artificial Sequence: Synthetic primer
agcaacgtatagctggtagtcc

SEQ ID NO: 19397 - DNA, 22 bp, Artificial Sequence
  Description of Artificial Sequence: Synthetic primer
tgtcatcggcagctttcttagt

SEQ ID NO: 19398 - DNA, 20 bp, Artificial Sequence
  Description of Artificial Sequence: Synthetic primer
gaagcgtcggtcacttcaac

SEQ ID NO: 19399 - DNA, 29 bp, Artificial Sequence
  Description of Artificial Sequence: Synthetic primer
tgactatatcaatcatactacaggatggt

SEQ ID NO: 19400 - DNA, 21 bp, Artificial Sequence
  Description of Artificial Sequence: Synthetic primer
gctgggtttcaaggctgtttg

SEQ ID NO: 19401 - DNA, 28 bp, Artificial Sequence
  Description of Artificial Sequence: Synthetic primer
gcaagaagcacagtaaatttaacaaggt

SEQ ID NO: 19402 - DNA, 26 bp, Artificial Sequence
  Description of Artificial Sequence: Synthetic primer
tgtgctcatcaacaaacctaagcata

SEQ ID NO: 19403 - DNA, 23 bp, Artificial Sequence
  Description of Artificial Sequence: Synthetic primer
ttcgtatccagaacaagttccga

SEQ ID NO: 19404 - DNA, 24 bp, Artificial Sequence
  Description of Artificial Sequence: Synthetic primer
ggaattcatcaaactgctccgaaa

SEQ ID NO: 19405 - DNA, 21 bp, Artificial Sequence
  Description of Artificial Sequence: Synthetic primer
ctatgctcaagacgcatgcag

SEQ ID NO: 19406 - DNA, 25 bp, Artificial Sequence
  Description of Artificial Sequence: Synthetic primer
ctggatatgattgtccatgccagat

SEQ ID NO: 19407 - DNA, 28 bp, Artificial Sequence
  Description of Artificial Sequence: Synthetic primer
gccaagaatccaagaataagaaagcatt

SEQ ID NO: 19408 - DNA, 21 bp, Artificial Sequence
  Description of Artificial Sequence: Synthetic primer
cacacatccgtacatgccagt

SEQ ID NO: 19409 - DNA, 23 bp, Artificial Sequence
  Description of Artificial Sequence: Synthetic primer
cttgaatcaactgccgaagatcg

SEQ ID NO: 19410 - DNA, 22 bp, Artificial Sequence
  Description of Artificial Sequence: Synthetic primer
ttgatcctgctctgagcttgtt

SEQ ID NO: 19411 - DNA, 21 bp, Artificial Sequence
  Description of Artificial Sequence: Synthetic primer
acgacatgtgtgctggttcat

SEQ ID NO: 19412 - DNA, 26 bp, Artificial Sequence
  Description of Artificial Sequence: Synthetic primer
agcataaaagttgtacagaagtcagc

SEQ ID NO: 19413 - DNA, 21 bp, Artificial Sequence
  Description of Artificial Sequence: Synthetic primer
tagtatgccgtccgaagaagc

SEQ ID NO: 19414 - DNA, 27 bp, Artificial Sequence
  Description of Artificial Sequence: Synthetic primer
acctaccaatatcacctaccatttcct

SEQ ID NO: 19415 - DNA, 21 bp, Artificial Sequence
  Description of Artificial Sequence: Synthetic primer
ggaacccttgaccttgaaccg

SEQ ID NO: 19416 - DNA, 27 bp, Artificial Sequence
  Description of Artificial Sequence: Synthetic primer
gtaaagctgtcctgtgaaaattcgatt

SEQ ID NO: 19417 - DNA, 24 bp, Artificial Sequence
  Description of Artificial Sequence: Synthetic primer
agtaacacatcacttgcgactgaa

SEQ ID NO: 19418 - DNA, 25 bp, Artificial Sequence
  Description of Artificial Sequence: Synthetic primer
ggattatcagcatctggtgtacctg

SEQ ID NO: 19419 - DNA, 24 bp, Artificial Sequence
  Description of Artificial Sequence: Synthetic primer
ctcaaaacacaaagatggcccaaa

SEQ ID NO: 19420 - DNA, 28 bp, Artificial Sequence
  Description of Artificial Sequence: Synthetic primer
cagatctccggtatatttctgacttgat

SEQ ID NO: 19421 - DNA, 25 bp, Artificial Sequence
  Description of Artificial Sequence: Synthetic primer
aggagtttctggctgcctaaattaa

SEQ ID NO: 19422 - DNA, 20 bp, Artificial Sequence
  Description of Artificial Sequence: Synthetic primer
gatccaggactcatggcgat

SEQ ID NO: 19423 - DNA, 23 bp, Artificial Sequence
  Description of Artificial Sequence: Synthetic primer
cctcgtgtcgtttaagatcagca

SEQ ID NO: 19424 - DNA, 21 bp, Artificial Sequence
  Description of Artificial Sequence: Synthetic primer
aacagcaggccatgacaacta

SEQ ID NO: 19425 - DNA, 22 bp, Artificial Sequence
  Description of Artificial Sequence: Synthetic primer
agcttctgttcatactcagcca

SEQ ID NO: 19426 - DNA, 21 bp, Artificial Sequence
  Description of Artificial Sequence: Synthetic primer
caggaaggagtgacacgttct

SEQ ID NO: 19427 - DNA, 21 bp, Artificial Sequence
  Description of Artificial Sequence: Synthetic primer
ttaaacgcctcatgcccacat

SEQ ID NO: 19428 - DNA, 22 bp, Artificial Sequence
  Description of Artificial Sequence: Synthetic primer
ccttgacgatgatgcagaggac

SEQ ID NO: 19429 - DNA, 28 bp, Artificial Sequence
  Description of Artificial Sequence: Synthetic primer
acatgacacatctagcatacatgctaat

SEQ ID NO: 19430 - DNA, 22 bp, Artificial Sequence
  Description of Artificial Sequence: Synthetic primer
acaaaagacgaggactcatggt

SEQ ID NO: 19431 - DNA, 22 bp, Artificial Sequence
  Description of Artificial Sequence: Synthetic primer
ggcttcaccgagctcaatctaa

SEQ ID NO: 19432 - DNA, 26 bp, Artificial Sequence
  Description of Artificial Sequence: Synthetic primer
tcgaactttacaaaatttggcttgga

SEQ ID NO: 19433 - DNA, 22 bp, Artificial Sequence
  Description of Artificial Sequence: Synthetic primer
gcatagacagatcaggcaggag

SEQ ID NO: 19434 - DNA, 21 bp, Artificial Sequence
  Description of Artificial Sequence: Synthetic primer
ggcgtctccaatctctcttcc

SEQ ID NO: 19435 - DNA, 25 bp, Artificial Sequence
  Description of Artificial Sequence: Synthetic primer
caatttagtccagtctctcctaccg

SEQ ID NO: 19436 - DNA, 23 bp, Artificial Sequence
  Description of Artificial Sequence: Synthetic primer
gctattggcataacaaccggtac

SEQ ID NO: 19437 - DNA, 23 bp, Artificial Sequence
  Description of Artificial Sequence: Synthetic primer
cgtcatggaccaccatacgtaaa

SEQ ID NO: 19438 - DNA, 28 bp, Artificial Sequence
  Description of Artificial Sequence: Synthetic primer
tccatatataaatgcatgcagcaagaac

SEQ ID NO: 19439 - DNA, 19 bp, Artificial Sequence
  Description of Artificial Sequence: Synthetic primer
ctgcttgccaggatagcgt

SEQ ID NO: 19440 - DNA, 21 bp, Artificial Sequence
  Description of Artificial Sequence: Synthetic primer
ccttttgactgctggacgaac

SEQ ID NO: 19441 - DNA, 23 bp, Artificial Sequence
  Description of Artificial Sequence: Synthetic primer
aaccctcaacctgttaatttcgc

SEQ ID NO: 19442 - DNA, 26 bp, Artificial Sequence
  Description of Artificial Sequence: Synthetic primer
acgctggttgaccgagattaatatac

SEQ ID NO: 19443 - DNA, 20 bp, Artificial Sequence
  Description of Artificial Sequence: Synthetic primer
ggcctcgtattggacgcata

SEQ ID NO: 19444 - DNA, 21 bp, Artificial Sequence
  Description of Artificial Sequence: Synthetic primer
ccatcagaagacgacgcatca

SEQ ID NO: 19445 - DNA, 21 bp, Artificial Sequence
  Description of Artificial Sequence: Synthetic primer
tcggacacgttcttcagaagc

SEQ ID NO: 19446 - DNA, 22 bp, Artificial Sequence
  Description of Artificial Sequence: Synthetic primer
tgataacccctagctgtcaacg

SEQ ID NO: 19447 - DNA, 26 bp, Artificial Sequence
  Description of Artificial Sequence: Synthetic primer
atttgtaagtactgcaaggctgattc

SEQ ID NO: 19448 - DNA, 22 bp, Artificial Sequence
  Description of Artificial Sequence: Synthetic primer
tggtggaagtttccaagtggag

SEQ ID NO: 19449 - DNA, 28 bp, Artificial Sequence
  Description of Artificial Sequence: Synthetic primer
aacaatattagactcagacagacagacg

SEQ ID NO: 19450 - DNA, 21 bp, Artificial Sequence
  Description of Artificial Sequence: Synthetic primer
caccctcggcagtatctgtag

SEQ ID NO: 19451 - DNA, 23 bp, Artificial Sequence
  Description of Artificial Sequence: Synthetic primer
acattggaaataggcagcctaca

SEQ ID NO: 19452 - DNA, 24 bp, Artificial Sequence
  Description of Artificial Sequence: Synthetic primer
gcgctgtatacccaggcttatatt

SEQ ID NO: 19453 - DNA, 22 bp, Artificial Sequence
  Description of Artificial Sequence: Synthetic primer
ccgagctcaaactcaagagtcc

SEQ ID NO: 19454 - DNA, 21 bp, Artificial Sequence
  Description of Artificial Sequence: Synthetic primer
actcagatggtgctgctgttg

SEQ ID NO: 19455 - DNA, 23 bp, Artificial Sequence
  Description of Artificial Sequence: Synthetic primer
gggccacgttctgaaattcctta

SEQ ID NO: 19456 - DNA, 26 bp, Artificial Sequence
  Description of Artificial Sequence: Synthetic primer
tctgggagaaacagttcatttgagag

SEQ ID NO: 19457 - DNA, 21 bp, Artificial Sequence
  Description of Artificial Sequence: Synthetic primer
gtggttctcgcggaattcatc

SEQ ID NO: 19458 - DNA, 28 bp, Artificial Sequence
  Description of Artificial Sequence: Synthetic primer
gtaataatcaagagcaccaagtgaacat

SEQ ID NO: 19459 - DNA, 26 bp, Artificial Sequence
  Description of Artificial Sequence: Synthetic primer
agaaagctaaatttaaacccaacgca

SEQ ID NO: 19460 - DNA, 22 bp, Artificial Sequence
  Description of Artificial Sequence: Synthetic primer
caaggtcgacaatgaagtccac

SEQ ID NO: 19461 - DNA, 21 bp, Artificial Sequence
  Description of Artificial Sequence: Synthetic primer
ctggacgaaggttgcaacagt

SEQ ID NO: 19462 - DNA, 21 bp, Artificial Sequence
  Description of Artificial Sequence: Synthetic primer
tttctccccgctgaatcatgc

SEQ ID NO: 19463 - DNA, 24 bp, Artificial Sequence
  Description of Artificial Sequence: Synthetic primer
ccctgatctttgtacttgctaggt

SEQ ID NO: 19464 - DNA, 25 bp, Artificial Sequence
  Description of Artificial Sequence: Synthetic primer
aacaatcccaaaacacatacaggtc

SEQ ID NO: 19465 - DNA, 24 bp, Artificial Sequence
  Description of Artificial Sequence: Synthetic primer
gcggcaaaaggatttatgtcatcc

SEQ ID NO: 19466 - DNA, 21 bp, Artificial Sequence
  Description of Artificial Sequence: Synthetic primer
atgccgttgctacaagtcgag

SEQ ID NO: 19467 - DNA, 22 bp, Artificial Sequence
  Description of Artificial Sequence: Synthetic primer
taacagcagtagcccagctaca

SEQ ID NO: 19468 - DNA, 21 bp, Artificial Sequence
  Description of Artificial Sequence: Synthetic primer
aacaactgcaaaagctgcttg

SEQ ID NO: 19469 - DNA, 27 bp, Artificial Sequence
  Description of Artificial Sequence: Synthetic primer
cttccatgacataaagtataggtgcca

SEQ ID NO: 19470 - DNA, 23 bp, Artificial Sequence
  Description of Artificial Sequence: Synthetic primer
aacttaaaccagtgcctattgcg

SEQ ID NO: 19471 - DNA, 25 bp, Artificial Sequence
  Description of Artificial Sequence: Synthetic primer
gagcagacatcttgtcctctatcaa

SEQ ID NO: 19472 - DNA, 22 bp, Artificial Sequence
  Description of Artificial Sequence: Synthetic primer
agcatccagcgatagctccata

SEQ ID NO: 19473 - DNA, 21 bp, Artificial Sequence
  Description of Artificial Sequence: Synthetic primer
tgcttgtaggccttgaactgg

SEQ ID NO: 19474 - DNA, 21 bp, Artificial Sequence
  Description of Artificial Sequence: Synthetic primer
cacgagcacctcctcatcttt

SEQ ID NO: 19475 - DNA, 22 bp, Artificial Sequence
  Description of Artificial Sequence: Synthetic primer
gccctgttgctttcctccataa

SEQ ID NO: 19476 - DNA, 22 bp, Artificial Sequence
  Description of Artificial Sequence: Synthetic primer
aggcagctgtagcataacgatc

SEQ ID NO: 19477 - DNA, 25 bp, Artificial Sequence
  Description of Artificial Sequence: Synthetic primer
catgaatagcgtcccatgaacctat

SEQ ID NO: 19478 - DNA, 21 bp, Artificial Sequence
  Description of Artificial Sequence: Synthetic primer
caatgggcatttcggtctgtg

SEQ ID NO: 19479 - DNA, 19 bp, Artificial Sequence
  Description of Artificial Sequence: Synthetic primer
ggcagaaggtgacgacgta

SEQ ID NO: 19480 - DNA, 21 bp, Artificial Sequence
  Description of Artificial Sequence: Synthetic primer
gcaacgtcaactgtccaaagg

SEQ ID NO: 19481 - DNA, 22 bp, Artificial Sequence
  Description of Artificial Sequence: Synthetic primer
agacgtctcccagtttggagta

SEQ ID NO: 19482 - DNA, 23 bp, Artificial Sequence
  Description of Artificial Sequence: Synthetic primer
gcactgtttgaatcctcttgtgc

SEQ ID NO: 19483 - DNA, 21 bp, Artificial Sequence
  Description of Artificial Sequence: Synthetic primer
ccagttgcacggacttcagat

SEQ ID NO: 19484 - DNA, 18 bp, Artificial Sequence
  Description of Artificial Sequence: Synthetic primer
gaggcgatgatgggtcct

SEQ ID NO: 19485 - DNA, 25 bp, Artificial Sequence
  Description of Artificial Sequence: Synthetic primer
ccgcatagtcttcaaagaatgcttc

SEQ ID NO: 19486 - DNA, 21 bp, Artificial Sequence
  Description of Artificial Sequence: Synthetic primer
gcaaccggatctgtgcaaatg

SEQ ID NO: 19487 - DNA, 21 bp, Artificial Sequence
  Description of Artificial Sequence: Synthetic primer
cagcgtgaagtccacccatat

SEQ ID NO: 19488 - DNA, 19 bp, Artificial Sequence
  Description of Artificial Sequence: Synthetic primer
ctacggacgcgtccatctc

SEQ ID NO: 19489 - DNA, 27 bp, Artificial Sequence
  Description of Artificial Sequence: Synthetic primer
gcacaatcttcagcattagctattcca

SEQ ID NO: 19490 - DNA, 20 bp, Artificial Sequence
  Description of Artificial Sequence: Synthetic primer
ctccagacgctcaattgcag

SEQ ID NO: 19491 - DNA, 24 bp, Artificial Sequence
  Description of Artificial Sequence: Synthetic primer
cgaactcgacgagagatctagttt

SEQ ID NO: 19492 - DNA, 21 bp, Artificial Sequence
  Description of Artificial Sequence: Synthetic primer
ctggatgcttcagacgctttg

SEQ ID NO: 19493 - DNA, 22 bp, Artificial Sequence
  Description of Artificial Sequence: Synthetic primer
ccctgttcctcaagagatggga

SEQ ID NO: 19494 - DNA, 22 bp, Artificial Sequence
  Description of Artificial Sequence: Synthetic primer
gttacgttgcctgaccagaaaa

SEQ ID NO: 19495 - DNA, 28 bp, Artificial Sequence
  Description of Artificial Sequence: Synthetic primer
cgatgaacaaacatcagttacaaggtac

SEQ ID NO: 19496 - DNA, 26 bp, Artificial Sequence
  Description of Artificial Sequence: Synthetic primer
agattgtcgagaatctgaagttctgt

SEQ ID NO: 19497 - DNA, 26 bp, Artificial Sequence
  Description of Artificial Sequence: Synthetic primer
atgttttgaaatggaggcagtacttc

SEQ ID NO: 19498 - DNA, 21 bp, Artificial Sequence
  Description of Artificial Sequence: Synthetic primer
atgcatgagacctggaacgag

SEQ ID NO: 19499 - DNA, 19 bp, Artificial Sequence
  Description of Artificial Sequence: Synthetic primer
ctagcgttgccacgtccat

SEQ ID NO: 19500 - DNA, 25 bp, Artificial Sequence
  Description of Artificial Sequence: Synthetic primer
ggtagatatatcagcgaagggagga

SEQ ID NO: 19501 - DNA, 22 bp, Artificial Sequence
  Description of Artificial Sequence: Synthetic primer
cggttggttcagcaagaaaacc

SEQ ID NO: 19502 - DNA, 23 bp, Artificial Sequence
  Description of Artificial Sequence: Synthetic primer
aaatacagctcacaaacgtgtcc

SEQ ID NO: 19503 - DNA, 24 bp, Artificial Sequence
  Description of Artificial Sequence: Synthetic primer
gccaccctccttgtcaaataaatc

SEQ ID NO: 19504 - DNA, 21 bp, Artificial Sequence
  Description of Artificial Sequence: Synthetic primer
attggatcctgcccacagaga

SEQ ID NO: 19505 - DNA, 25 bp, Artificial Sequence
  Description of Artificial Sequence: Synthetic primer
gatatcaccaagattggcaatgagg

SEQ ID NO: 19506 - DNA, 21 bp, Artificial Sequence
  Description of Artificial Sequence: Synthetic primer
agttcatctcccatggcaagg

SEQ ID NO: 19507 - DNA, 19 bp, Artificial Sequence
  Description of Artificial Sequence: Synthetic primer
ggccaaagagctcctcctc

SEQ ID NO: 19508 - DNA, 21 bp, Artificial Sequence
  Description of Artificial Sequence: Synthetic primer
tagagacgtcgggttgtaccg

SEQ ID NO: 19509 - DNA, 18 bp, Artificial Sequence
  Description of Artificial Sequence: Synthetic primer
cgcggcctcatcccaatg

SEQ ID NO: 19510 - DNA, 22 bp, Artificial Sequence
  Description of Artificial Sequence: Synthetic primer
catctcaccaaaccgaatccct

SEQ ID NO: 19511 - DNA, 21 bp, Artificial Sequence
  Description of Artificial Sequence: Synthetic primer
tgcctggagctacagagacat

SEQ ID NO: 19512 - DNA, 21 bp, Artificial Sequence
  Description of Artificial Sequence: Synthetic primer
agcctacaagcttagggctct

SEQ ID NO: 19513 - DNA, 21 bp, Artificial Sequence
  Description of Artificial Sequence: Synthetic primer
cttgcagcccgatcaaaagtc

SEQ ID NO: 19514 - DNA, 24 bp, Artificial Sequence
  Description of Artificial Sequence: Synthetic primer
tggatttgctggcatcacagttta

SEQ ID NO: 19515 - DNA, 24 bp, Artificial Sequence
  Description of Artificial Sequence: Synthetic primer
agagagagagaaagctgttagctg

SEQ ID NO: 19516 - DNA, 21 bp, Artificial Sequence
  Description of Artificial Sequence: Synthetic primer
actaccttcgcaggatttccc

SEQ ID NO: 19517 - DNA, 23 bp, Artificial Sequence
  Description of Artificial Sequence: Synthetic primer
gactgaagatctacacggaccag

SEQ ID NO: 19518 - DNA, 27 bp, Artificial Sequence
  Description of Artificial Sequence: Synthetic primer
tcaaggaattgtacactggtaccaatc

SEQ ID NO: 19519 - DNA, 23 bp, Artificial Sequence
  Description of Artificial Sequence: Synthetic primer
aattcaacaccagcctagagagg

SEQ ID NO: 19520 - DNA, 28 bp, Artificial Sequence
  Description of Artificial Sequence: Synthetic primer
ggctagctaaagggaaaactaacatagc

SEQ ID NO: 19521 - DNA, 27 bp, Artificial Sequence
  Description of Artificial Sequence: Synthetic primer
acatgttgaaactgtatcttagtccca

SEQ ID NO: 19522 - DNA, 19 bp, Artificial Sequence
  Description of Artificial Sequence: Synthetic primer
accttcagccttcccttcc

SEQ ID NO: 19523 - DNA, 21 bp, Artificial Sequence
  Description of Artificial Sequence: Synthetic primer
agcccgagctacaagtttgag

SEQ ID NO: 19524 - DNA, 21 bp, Artificial Sequence
  Description of Artificial Sequence: Synthetic primer
ggccttgatatggtacagcca

SEQ ID NO: 19525 - DNA, 22 bp, Artificial Sequence
  Description of Artificial Sequence: Synthetic primer
cggaagcttccaagagacttgt

SEQ ID NO: 19526 - DNA, 22 bp, Artificial Sequence
  Description of Artificial Sequence: Synthetic primer
acaaagtatccctagccccaga

SEQ ID NO: 19527 - DNA, 21 bp, Artificial Sequence
  Description of Artificial Sequence: Synthetic primer
tgctgctcaatagtccgtctt

SEQ ID NO: 19528 - DNA, 25 bp, Artificial Sequence
  Description of Artificial Sequence: Synthetic primer
gtagccatctaaccctacaataccc

SEQ ID NO: 19529 - DNA, 24 bp, Artificial Sequence
  Description of Artificial Sequence: Synthetic primer
catccctgttctcgggatctattt

SEQ ID NO: 19530 - DNA, 19 bp, Artificial Sequence
  Description of Artificial Sequence: Synthetic primer
gtccaggccaacatttccc

SEQ ID NO: 19531 - DNA, 23 bp, Artificial Sequence
  Description of Artificial Sequence: Synthetic primer
actacatttagtcggaccactgc

SEQ ID NO: 19532 - DNA, 26 bp, Artificial Sequence
  Description of Artificial Sequence: Synthetic primer
gcagatggttaaaggagaaactgtct

SEQ ID NO: 19533 - DNA, 22 bp, Artificial Sequence
  Description of Artificial Sequence: Synthetic primer
gccaatccatcaaggtgaacag

SEQ ID NO: 19534 - DNA, 26 bp, Artificial Sequence
  Description of Artificial Sequence: Synthetic primer
caaatacacatctttttccagacgga

SEQ ID NO: 19535 - DNA, 27 bp, Artificial Sequence
  Description of Artificial Sequence: Synthetic primer
cgttccattttcaaaagtgttctcagg

SEQ ID NO: 19536 - DNA, 22 bp, Artificial Sequence
  Description of Artificial Sequence: Synthetic primer
gtcacacctttctcgaacctca

SEQ ID NO: 19537 - DNA, 25 bp, Artificial Sequence
  Description of Artificial Sequence: Synthetic primer
cccgacctcataaagcttctttttc

SEQ ID NO: 19538 - DNA, 22 bp, Artificial Sequence
  Description of Artificial Sequence: Synthetic primer
gcttcagccttttctccttgag

SEQ ID NO: 19539 - DNA, 26 bp, Artificial Sequence
  Description of Artificial Sequence: Synthetic primer
ttttgagttcagttcaattccgtgtt

SEQ ID NO: 19540 - DNA, 21 bp, Artificial Sequence
  Description of Artificial Sequence: Synthetic primer
gcttgggctacgtttctttgg

SEQ ID NO: 19541 - DNA, 19 bp, Artificial Sequence
  Description of Artificial Sequence: Synthetic primer
cacgcagacatggctcaac

SEQ ID NO: 19542 - DNA, 25 bp, Artificial Sequence
  Description of Artificial Sequence: Synthetic primer
ttgctcttccatgtgattcacattc

SEQ ID NO: 19543 - DNA, 21 bp, Artificial Sequence
  Description of Artificial Sequence: Synthetic primer
cgctgtctgattctgcaccat

SEQ ID NO: 19544 - DNA, 20 bp, Artificial Sequence
  Description of Artificial Sequence: Synthetic primer
agggtaccaagaccttccca

SEQ ID NO: 19545 - DNA, 28 bp, Artificial Sequence
  Description of Artificial Sequence: Synthetic primer
acatagttctaatgcatactgagacaca

SEQ ID NO: 19546 - DNA, 26 bp, Artificial Sequence
  Description of Artificial Sequence: Synthetic primer
aaagtgagggttacagatctcgtaga

SEQ ID NO: 19547 - DNA, 26 bp, Artificial Sequence
  Description of Artificial Sequence: Synthetic primer
gcagcagatacgaatattgtacgatg

SEQ ID NO: 19548 - DNA, 21 bp, Artificial Sequence
  Description of Artificial Sequence: Synthetic primer
gtcagggtagcactcgaacag

SEQ ID NO: 19549 - DNA, 27 bp, Artificial Sequence
  Description of Artificial Sequence: Synthetic primer
agatggttgtcctgatatctgtcattg

SEQ ID NO: 19550 - DNA, 22 bp, Artificial Sequence
  Description of Artificial Sequence: Synthetic primer
tggtagaagcccacaaatgaca

SEQ ID NO: 19551 - DNA, 21 bp, Artificial Sequence
  Description of Artificial Sequence: Synthetic primer
gccagcttctttgtgcagtag

SEQ ID NO: 19552 - DNA, 19 bp, Artificial Sequence
  Description of Artificial Sequence: Synthetic primer
ctgctggcggatgaagagg

SEQ ID NO: 19553 - DNA, 22 bp, Artificial Sequence
  Description of Artificial Sequence: Synthetic primer
ggatgtagaatgcacggtaggc

SEQ ID NO: 19554 - DNA, 28 bp, Artificial Sequence
  Description of Artificial Sequence: Synthetic primer
gataaattgtccggtgttaggttgaaaa

SEQ ID NO: 19555 - DNA, 23 bp, Artificial Sequence
  Description of Artificial Sequence: Synthetic primer
cgtattttcgccatgcttctggt

SEQ ID NO: 19556 - DNA, 21 bp, Artificial Sequence
  Description of Artificial Sequence: Synthetic primer
tgaatgcctgaaagcaacacc

SEQ ID NO: 19557 - DNA, 23 bp, Artificial Sequence
  Description of Artificial Sequence: Synthetic primer
tcataggagctatctcccaccat

SEQ ID NO: 19558 - DNA, 22 bp, Artificial Sequence
  Description of Artificial Sequence: Synthetic primer
cgaagaacagttcgacagctga

SEQ ID NO: 19559 - DNA, 22 bp, Artificial Sequence
  Description of Artificial Sequence: Synthetic primer
tcccagattctctttcgcgatt

SEQ ID NO: 19560 - DNA, 21 bp, Artificial Sequence
  Description of Artificial Sequence: Synthetic primer
gcctttctcacccatcctctt

SEQ ID NO: 19561 - DNA, 22 bp, Artificial Sequence
  Description of Artificial Sequence: Synthetic primer
ctgaaaaggatgggctgaggtt

SEQ ID NO: 19562 - DNA, 27 bp, Artificial Sequence
  Description of Artificial Sequence: Synthetic primer
gggataactcctactatcagctaatgc

SEQ ID NO: 19563 - DNA, 23 bp, Artificial Sequence
  Description of Artificial Sequence: Synthetic primer
ccaaaagttcagagtctccttgc

SEQ ID NO: 19564 - DNA, 21 bp, Artificial Sequence
  Description of Artificial Sequence: Synthetic primer
gtgctcaagcacgacaacatc

SEQ ID NO: 19565 - DNA, 28 bp, Artificial Sequence
  Description of Artificial Sequence: Synthetic primer
acaaaattgtggaaacatacacgttcaa

SEQ ID NO: 19566 - DNA, 26 bp, Artificial Sequence
  Description of Artificial Sequence: Synthetic primer
caagtaaaaccccaactctcaaatgc

SEQ ID NO: 19567 - DNA, 23 bp, Artificial Sequence
  Description of Artificial Sequence: Synthetic primer
cgtcatctgcacattcctttctc

SEQ ID NO: 19568 - DNA, 22 bp, Artificial Sequence
  Description of Artificial Sequence: Synthetic primer
tcatccaaaggtccaaactgct

SEQ ID NO: 19569 - DNA, 21 bp, Artificial Sequence
  Description of Artificial Sequence: Synthetic primer
cacagaaatggtccaccggat

SEQ ID NO: 19570 - DNA, 28 bp, Artificial Sequence
  Description of Artificial Sequence: Synthetic primer
cataaccatagttttgcatgctaggatc

SEQ ID NO: 19571 - DNA, 23 bp, Artificial Sequence
  Description of Artificial Sequence: Synthetic primer
tggtcattgaagagagaaagcca

SEQ ID NO: 19572 - DNA, 24 bp, Artificial Sequence
  Description of Artificial Sequence: Synthetic primer
ttcagtgaatcctacacagcaaga

SEQ ID NO: 19573 - DNA, 22 bp, Artificial Sequence
  Description of Artificial Sequence: Synthetic primer
ttaacaggaccaacgtgaacct

SEQ ID NO: 19574 - DNA, 21 bp, Artificial Sequence
  Description of Artificial Sequence: Synthetic primer
gttgctggttcccgtagaagg

SEQ ID NO: 19575 - DNA, 19 bp, Artificial Sequence
  Description of Artificial Sequence: Synthetic primer
cctgcctcgaaccttcgac

SEQ ID NO: 19576 - DNA, 26 bp, Artificial Sequence
  Description of Artificial Sequence: Synthetic primer
tgaaaaatctattggcatgctacctg

SEQ ID NO: 19577 - DNA, 23 bp, Artificial Sequence
  Description of Artificial Sequence: Synthetic primer
gtccgaacctactgtttcctagt

SEQ ID NO: 19578 - DNA, 25 bp, Artificial Sequence
  Description of Artificial Sequence: Synthetic primer
tgacaatggtcaaaacatacaccag

SEQ ID NO: 19579 - DNA, 24 bp, Artificial Sequence
  Description of Artificial Sequence: Synthetic primer
cccgagttgcttttgtggtaaaat

SEQ ID NO: 19580 - DNA, 21 bp, Artificial Sequence
  Description of Artificial Sequence: Synthetic primer
catgtagaatggctccagcgt

SEQ ID NO: 19581 - DNA, 28 bp, Artificial Sequence
  Description of Artificial Sequence: Synthetic primer
ccacagtaagccaacatgcataataatt

SEQ ID NO: 19582 - DNA, 29 bp, Artificial Sequence
  Description of Artificial Sequence: Synthetic primer
cgttgttcaatgaatttcttgatgtacac

SEQ ID NO: 19583 - DNA, 28 bp, Artificial Sequence
  Description of Artificial Sequence: Synthetic primer
ctttagaggttgtctatctaggagcaga

SEQ ID NO: 19584 - DNA, 23 bp, Artificial Sequence
  Description of Artificial Sequence: Synthetic primer
tttcagctccttcctcttgactt

SEQ ID NO: 19585 - DNA, 28 bp, Artificial Sequence
  Description of Artificial Sequence: Synthetic primer
tcaccaatacaaacttattcagaagcct

SEQ ID NO: 19586 - DNA, 25 bp, Artificial Sequence
  Description of Artificial Sequence: Synthetic primer
tcttgctattaagtggacgttccag

SEQ ID NO: 19587 - DNA, 24 bp, Artificial Sequence
  Description of Artificial Sequence: Synthetic primer
tttgcagaactgatcgaacttgag

SEQ ID NO: 19588 - DNA, 23 bp, Artificial Sequence
  Description of Artificial Sequence: Synthetic primer
gatctcttcgcgcttaaaccttg

SEQ ID NO: 19589 - DNA, 24 bp, Artificial Sequence
  Description of Artificial Sequence: Synthetic primer
actttggcagaaacaaaagcatca

SEQ ID NO: 19590 - DNA, 26 bp, Artificial Sequence
  Description of Artificial Sequence: Synthetic primer
tgaatcgaacaacattggtatggtga

SEQ ID NO: 19591 - DNA, 27 bp, Artificial Sequence
  Description of Artificial Sequence: Synthetic primer
gagcaaatgtttgcatcaaatctagtc

SEQ ID NO: 19592 - DNA, 21 bp, Artificial Sequence
  Description of Artificial Sequence: Synthetic primer
ccccaatggcctcgatagaga

SEQ ID NO: 19593 - DNA, 25 bp, Artificial Sequence
  Description of Artificial Sequence: Synthetic primer
cattccttgcatgtaagatgaccac

SEQ ID NO: 19594 - DNA, 25 bp, Artificial Sequence
  Description of Artificial Sequence: Synthetic primer
gggactgtgcattgcatattagttt

SEQ ID NO: 19595 - DNA, 27 bp, Artificial Sequence
  Description of Artificial Sequence: Synthetic primer
aatgttgatgagtgactttctgctttc

SEQ ID NO: 19596 - DNA, 25 bp, Artificial Sequence
  Description of Artificial Sequence: Synthetic primer
tctctcaaccaactggaaagatgtc

SEQ ID NO: 19597 - DNA, 24 bp, Artificial Sequence
  Description of Artificial Sequence: Synthetic primer
aggccacatattatacaagcagca

SEQ ID NO: 19598 - DNA, 21 bp, Artificial Sequence
  Description of Artificial Sequence: Synthetic primer
cttcagccggttgcgtaaatt

SEQ ID NO: 19599 - DNA, 25 bp, Artificial Sequence
  Description of Artificial Sequence: Synthetic primer
caagccaataggcatttgtctttgt

SEQ ID NO: 19600 - DNA, 22 bp, Artificial Sequence
  Description of Artificial Sequence: Synthetic primer
tgccaggtacgttttcagatcg

SEQ ID NO: 19601 - DNA, 26 bp, Artificial Sequence
  Description of Artificial Sequence: Synthetic primer
gttccagcatccttcaacatttgaat

SEQ ID NO: 19602 - DNA, 28 bp, Artificial Sequence
  Description of Artificial Sequence: Synthetic primer
ccaaacaaatgttagctggttcttgtaa

SEQ ID NO: 19603 - DNA, 23 bp, Artificial Sequence
  Description of Artificial Sequence: Synthetic primer
tcaccttcttatcaaagcagcga

SEQ ID NO: 19604 - DNA, 20 bp, Artificial Sequence
  Description of Artificial Sequence: Synthetic primer
agtatcgcgcgggagtagta

SEQ ID NO: 19605 - DNA, 21 bp, Artificial Sequence
  Description of Artificial Sequence: Synthetic primer
aacgggtccacgacctatagt

SEQ ID NO: 19606 - DNA, 23 bp, Artificial Sequence
  Description of Artificial Sequence: Synthetic primer
ggctttccaggtcttgtagtagg

SEQ ID NO: 19607 - DNA, 21 bp, Artificial Sequence
  Description of Artificial Sequence: Synthetic primer
cgtcttcaggacacgatgtgg

SEQ ID NO: 19608 - DNA, 21 bp, Artificial Sequence
  Description of Artificial Sequence: Synthetic primer
aagatcggcatcaacggtttc

SEQ ID NO: 19609 - DNA, 23 bp, Artificial Sequence
  Description of Artificial Sequence: Synthetic primer
ctagcttttcaccgacaccaaga

SEQ ID NO: 19610 - DNA, 28 bp, Artificial Sequence
  Description of Artificial Sequence: Synthetic primer
ctcatttaaggaactgccagttttctag

SEQ ID NO: 19611 - DNA, 23 bp, Artificial Sequence
  Description of Artificial Sequence: Synthetic primer
ctcttttgtttccggttgtggtg

SEQ ID NO: 19612 - DNA, 27 bp, Artificial Sequence
  Description of Artificial Sequence: Synthetic primer
agcaagatacccaaaacagaatgaaac

SEQ ID NO: 19613 - DNA, 21 bp, Artificial Sequence
  Description of Artificial Sequence: Synthetic primer
gcagccttctgcaaacctaga

SEQ ID NO: 19614 - DNA, 25 bp, Artificial Sequence
  Description of Artificial Sequence: Synthetic primer
ggtagatgcagtgatcaaagctctt

SEQ ID NO: 19615 - DNA, 21 bp, Artificial Sequence
  Description of Artificial Sequence: Synthetic primer
tttctatgtggtcgccacctg

SEQ ID NO: 19616 - DNA, 24 bp, Artificial Sequence
  Description of Artificial Sequence: Synthetic primer
gatacgccatgtattttgcaccaa

SEQ ID NO: 19617 - DNA, 23 bp, Artificial Sequence
  Description of Artificial Sequence: Synthetic primer
gcaccatcgactaaagcatcaag

SEQ ID NO: 19618 - DNA, 26 bp, Artificial Sequence
  Description of Artificial Sequence: Synthetic primer
cacgccaataactttacaagcttcaa

SEQ ID NO: 19619 - DNA, 28 bp, Artificial Sequence
  Description of Artificial Sequence: Synthetic primer
ggttttctcaagaaaagtaaggctttgt

SEQ ID NO: 19620 - DNA, 21 bp, Artificial Sequence
  Description of Artificial Sequence: Synthetic primer
tgggtcctctgtcgacattct

SEQ ID NO: 19621 - DNA, 27 bp, Artificial Sequence
  Description of Artificial Sequence: Synthetic primer
gatggtataacaggtattcaccacact

SEQ ID NO: 19622 - DNA, 22 bp, Artificial Sequence
  Description of Artificial Sequence: Synthetic primer
tggctctgcttccattagttcc

SEQ ID NO: 19623 - DNA, 21 bp, Artificial Sequence
  Description of Artificial Sequence: Synthetic primer
agttcacgacatccggactag

SEQ ID NO: 19624 - DNA, 21 bp, Artificial Sequence
  Description of Artificial Sequence: Synthetic primer
gcgagtatcgtccaatcctca

SEQ ID NO: 19625 - DNA, 21 bp, Artificial Sequence
  Description of Artificial Sequence: Synthetic primer
gtactgttcctctcagtgcca

SEQ ID NO: 19626 - DNA, 23 bp, Artificial Sequence
  Description of Artificial Sequence: Synthetic primer
acagagagacaccactctaaccc

SEQ ID NO: 19627 - DNA, 23 bp, Artificial Sequence
  Description of Artificial Sequence: Synthetic primer
ggctaacaatgtcacaggactgg

SEQ ID NO: 19628 - DNA, 24 bp, Artificial Sequence
  Description of Artificial Sequence: Synthetic primer
tgaaaacggagggagtagttctca

SEQ ID NO: 19629 - DNA, 27 bp, Artificial Sequence
  Description of Artificial Sequence: Synthetic primer
tggcaaacaaatgacaaatggaaatga

SEQ ID NO: 19630 - DNA, 21 bp, Artificial Sequence
  Description of Artificial Sequence: Synthetic primer
aagctctacacctgcaccaag

SEQ ID NO: 19631 - DNA, 23 bp, Artificial Sequence
  Description of Artificial Sequence: Synthetic primer
ccttctttttgcggccatacttt

SEQ ID NO: 19632 - DNA, 24 bp, Artificial Sequence
  Description of Artificial Sequence: Synthetic primer
cgcagctttttgaaaatgttccag

SEQ ID NO: 19633 - DNA, 23 bp, Artificial Sequence
  Description of Artificial Sequence: Synthetic primer
cagccatttcaaggatctccaac

SEQ ID NO: 19634 - DNA, 23 bp, Artificial Sequence
  Description of Artificial Sequence: Synthetic primer
tcgtgacacccaagacataaacc

SEQ ID NO: 19635 - DNA, 22 bp, Artificial Sequence
  Description of Artificial Sequence: Synthetic primer
gattggtacctcagggatctcg

SEQ ID NO: 19636 - DNA, 28 bp, Artificial Sequence
  Description of Artificial Sequence: Synthetic primer
tgataaaaaccatacagctaatgaacgc

SEQ ID NO: 19637 - DNA, 23 bp, Artificial Sequence
  Description of Artificial Sequence: Synthetic primer
ccatgtcgagctgatttggtagg

SEQ ID NO: 19638 - DNA, 24 bp, Artificial Sequence
  Description of Artificial Sequence: Synthetic primer
cataactagacgagcagtgaggtc

SEQ ID NO: 19639 - DNA, 19 bp, Artificial Sequence
  Description of Artificial Sequence: Synthetic primer
gaactgctgcggaggatga

SEQ ID NO: 19640 - DNA, 30 bp, Artificial Sequence
  Description of Artificial Sequence: Synthetic primer
ctattatatagtaaaacgactgcctcaggt

SEQ ID NO: 19641 - DNA, 22 bp, Artificial Sequence
  Description of Artificial Sequence: Synthetic primer
ccaagcttgcgcatttttgcta

SEQ ID NO: 19642 - DNA, 27 bp, Artificial Sequence
  Description of Artificial Sequence: Synthetic primer
accataatggtagcacacacaaataga

SEQ ID NO: 19643 - DNA, 21 bp, Artificial Sequence
  Description of Artificial Sequence: Synthetic primer
cacgaccagtccttctggaac

SEQ ID NO: 19644 - DNA, 26 bp, Artificial Sequence
  Description of Artificial Sequence: Synthetic primer
cccttattctggaggcaaatatttcg

SEQ ID NO: 19645 - DNA, 21 bp, Artificial Sequence
  Description of Artificial Sequence: Synthetic primer
ccttcaagcttcagcaaaggg

SEQ ID NO: 19646 - DNA, 26 bp, Artificial Sequence
  Description of Artificial Sequence: Synthetic primer
agttccacgtgcaaaacttgtaaaaa

SEQ ID NO: 19647 - DNA, 23 bp, Artificial Sequence
  Description of Artificial Sequence: Synthetic primer
gggaagctcttgttgctatctga

SEQ ID NO: 19648 - DNA, 28 bp, Artificial Sequence
  Description of Artificial Sequence: Synthetic primer
agcaaattttcctatattcccagcatca

SEQ ID NO: 19649 - DNA, 24 bp, Artificial Sequence
  Description of Artificial Sequence: Synthetic primer
tgctccgctttctctacaatgaat

SEQ ID NO: 19650 - DNA, 20 bp, Artificial Sequence
  Description of Artificial Sequence: Synthetic primer
tacaatgggagccggcattc

SEQ ID NO: 19651 - DNA, 21 bp, Artificial Sequence
  Description of Artificial Sequence: Synthetic primer
ccgtgtggctgtgtcgtaata

SEQ ID NO: 19652 - DNA, 21 bp, Artificial Sequence
  Description of Artificial Sequence: Synthetic primer
aacttggtcgaggtgacaacg

SEQ ID NO: 19653 - DNA, 27 bp, Artificial Sequence
  Description of Artificial Sequence: Synthetic primer
cgcgggaaaactgaaattatcatacaa

SEQ ID NO: 19654 - DNA, 19 bp, Artificial Sequence
  Description of Artificial Sequence: Synthetic primer
gattgctccttgccgttgg

SEQ ID NO: 19655 - DNA, 21 bp, Artificial Sequence
  Description of Artificial Sequence: Synthetic primer
caccaagaaaacctgcgcttg

SEQ ID NO: 19656 - DNA, 22 bp, Artificial Sequence
  Description of Artificial Sequence: Synthetic primer
ccatccgaacttctccgtgtac

SEQ ID NO: 19657 - DNA, 22 bp, Artificial Sequence
  Description of Artificial Sequence: Synthetic primer
cggtgtagacattatggtgggt

SEQ ID NO: 19658 - DNA, 21 bp, Artificial Sequence
  Description of Artificial Sequence: Synthetic primer
gggtatcgatccccatcatgc

SEQ ID NO: 19659 - DNA, 28 bp, Artificial Sequence
  Description of Artificial Sequence: Synthetic primer
gcagtgactatttcaagttccatcctta

SEQ ID NO: 19660 - DNA, 21 bp, Artificial Sequence
  Description of Artificial Sequence: Synthetic primer
cccaacccaaggctctctaat

SEQ ID NO: 19661 - DNA, 28 bp, Artificial Sequence
  Description of Artificial Sequence: Synthetic primer
accttgtccttgtttctttgtatcttca

SEQ ID NO: 19662 - DNA, 28 bp, Artificial Sequence
  Description of Artificial Sequence: Synthetic primer
aaaagatggagagtatgtcaaggttaca

SEQ ID NO: 19663 - DNA, 29 bp, Artificial Sequence
  Description of Artificial Sequence: Synthetic primer
ataaaaacagggtgaatagctaatgcact

SEQ ID NO: 19664 - DNA, 26 bp, Artificial Sequence
  Description of Artificial Sequence: Synthetic primer
ggtacactttgcacttccataccata

SEQ ID NO: 19665 - DNA, 26 bp, Artificial Sequence
  Description of Artificial Sequence: Synthetic primer
aggaaagtggacaagtcatacaatgt

SEQ ID NO: 19666 - DNA, 21 bp, Artificial Sequence
  Description of Artificial Sequence: Synthetic primer
gctgcatcctgtggctgttat

SEQ ID NO: 19667 - DNA, 21 bp, Artificial Sequence
  Description of Artificial Sequence: Synthetic primer
tcgatggaagctgttcgtctg

SEQ ID NO: 19668 - DNA, 22 bp, Artificial Sequence
  Description of Artificial Sequence: Synthetic primer
aaactcacgaatgtcacttcgc

SEQ ID NO: 19669 - DNA, 22 bp, Artificial Sequence
  Description of Artificial Sequence: Synthetic primer
ggcggttgaagaaatgtcatcc

SEQ ID NO: 19670 - DNA, 19 bp, Artificial Sequence
  Description of Artificial Sequence: Synthetic primer
ggagtcagcacccactgtt

SEQ ID NO: 19671 - DNA, 21 bp, Artificial Sequence
  Description of Artificial Sequence: Synthetic primer
cccaaaggagcgagatgatgg

SEQ ID NO: 19672 - DNA, 22 bp, Artificial Sequence
  Description of Artificial Sequence: Synthetic primer
taacccagacgaactgctctga

SEQ ID NO: 19673 - DNA, 28 bp, Artificial Sequence
  Description of Artificial Sequence: Synthetic primer
actcttccttggtttcatcaaagtatcc

SEQ ID NO: 19674 - DNA, 23 bp, Artificial Sequence
  Description of Artificial Sequence: Synthetic primer
agaacccttcatgatcctcaagc

SEQ ID NO: 19675 - DNA, 21 bp, Artificial Sequence
  Description of Artificial Sequence: Synthetic primer
gtggagatggtgacgacgaag

SEQ ID NO: 19676 - DNA, 21 bp, Artificial Sequence
  Description of Artificial Sequence: Synthetic primer
ctactacaagggagggcgtga

SEQ ID NO: 19677 - DNA, 26 bp, Artificial Sequence
  Description of Artificial Sequence: Synthetic primer
ggagacgtacttccagaagccatata

SEQ ID NO: 19678 - DNA, 18 bp, Artificial Sequence
  Description of Artificial Sequence: Synthetic primer
agcttcacccgacgtagg

SEQ ID NO: 19679 - DNA, 24 bp, Artificial Sequence
  Description of Artificial Sequence: Synthetic primer
ttcatctactttacatcgctcgct

SEQ ID NO: 19680 - DNA, 18 bp, Artificial Sequence
  Description of Artificial Sequence: Synthetic primer
agtgcttgccgttggcat

SEQ ID NO: 19681 - DNA, 22 bp, Artificial Sequence
  Description of Artificial Sequence: Synthetic primer
tttcgatgtctgcaaggtcaac

SEQ ID NO: 19682 - DNA, 24 bp, Artificial Sequence
  Description of Artificial Sequence: Synthetic primer
gattgtgcatcagacactccttct

SEQ ID NO: 19683 - DNA, 27 bp, Artificial Sequence
  Description of Artificial Sequence: Synthetic primer
tgggataccaacatctttgtaccattt

SEQ ID NO: 19684 - DNA, 21 bp, Artificial Sequence
  Description of Artificial Sequence: Synthetic primer
gagtgtgacctgcatctgctc

SEQ ID NO: 19685 - DNA, 24 bp, Artificial Sequence
  Description of Artificial Sequence: Synthetic primer
ccaagcttcagagttcagaacaac

SEQ ID NO: 19686 - DNA, 21 bp, Artificial Sequence
  Description of Artificial Sequence: Synthetic primer
tttgcgccttcatgttcgtct

SEQ ID NO: 19687 - DNA, 21 bp, Artificial Sequence
  Description of Artificial Sequence: Synthetic primer
catgccattgtccgagaccat

SEQ ID NO: 19688 - DNA, 24 bp, Artificial Sequence
  Description of Artificial Sequence: Synthetic primer
tcaccgggtgtatctaccttatct

SEQ ID NO: 19689 - DNA, 21 bp, Artificial Sequence
  Description of Artificial Sequence: Synthetic primer
ctttttctggcggcacaacac

SEQ ID NO: 19690 - DNA, 21 bp, Artificial Sequence
  Description of Artificial Sequence: Synthetic primer
gccccctgatccaagggtata

SEQ ID NO: 19691 - DNA, 23 bp, Artificial Sequence
  Description of Artificial Sequence: Synthetic primer
ggaaccatcacctccttctgaat

SEQ ID NO: 19692 - DNA, 26 bp, Artificial Sequence
  Description of Artificial Sequence: Synthetic primer
agccctgaataagtgaaggtaaaagg

SEQ ID NO: 19693 - DNA, 26 bp, Artificial Sequence
  Description of Artificial Sequence: Synthetic primer
gctagagtaatagaaagtgcgactgg

SEQ ID NO: 19694 - DNA, 22 bp, Artificial Sequence
  Description of Artificial Sequence: Synthetic primer
gcgaagagcttaacgctcagat

SEQ ID NO: 19695 - DNA, 23 bp, Artificial Sequence
  Description of Artificial Sequence: Synthetic primer
gggtttattagccacggtgtttg

SEQ ID NO: 19696 - DNA, 27 bp, Artificial Sequence
  Description of Artificial Sequence: Synthetic primer
ccatgacatggcctgttcaattatttt

SEQ ID NO: 19697 - DNA, 28 bp, Artificial Sequence
  Description of Artificial Sequence: Synthetic primer
agcattttgggccctttattaagaagta

SEQ ID NO: 19698 - DNA, 21 bp, Artificial Sequence
  Description of Artificial Sequence: Synthetic primer
gaatgaaagttgcccatgcca

SEQ ID NO: 19699 - DNA, 26 bp, Artificial Sequence
  Description of Artificial Sequence: Synthetic primer
actctgttgcaactcaaaacaaagat

SEQ ID NO: 19700 - DNA, 21 bp, Artificial Sequence
  Description of Artificial Sequence: Synthetic primer
agcggccatacattttagcct

SEQ ID NO: 19701 - DNA, 22 bp, Artificial Sequence
  Description of Artificial Sequence: Synthetic primer
ggagcttctgcttctgagttgt

SEQ ID NO: 19702 - DNA, 19 bp, Artificial Sequence
  Description of Artificial Sequence: Synthetic primer
ctcggagtcgcgtttgttg

SEQ ID NO: 19703 - DNA, 28 bp, Artificial Sequence
  Description of Artificial Sequence: Synthetic primer
cctcctcttctgataaaggcagatagta

SEQ ID NO: 19704 - DNA, 22 bp, Artificial Sequence
  Description of Artificial Sequence: Synthetic primer
gaactgaagcattgtactggca

SEQ ID NO: 19705 - DNA, 28 bp, Artificial Sequence
  Description of Artificial Sequence: Synthetic primer
ctactagagcagagagtctacatgaaca

SEQ ID NO: 19706 - DNA, 22 bp, Artificial Sequence
  Description of Artificial Sequence: Synthetic primer
ttgtcgacataaacggttgagc

SEQ ID NO: 19707 - DNA, 19 bp, Artificial Sequence
  Description of Artificial Sequence: Synthetic primer
cgaggagggcttccttgtc

SEQ ID NO: 19708 - DNA, 21 bp, Artificial Sequence
  Description of Artificial Sequence: Synthetic primer
ttcagaagggtcgagatgcac

SEQ ID NO: 19709 - DNA, 22 bp, Artificial Sequence
  Description of Artificial Sequence: Synthetic primer
tccacttgacagaggctgctta

SEQ ID NO: 19710 - DNA, 22 bp, Artificial Sequence
  Description of Artificial Sequence: Synthetic primer
tgatgtttagcagcgcaaatcc

SEQ ID NO: 19711 - DNA, 21 bp, Artificial Sequence
  Description of Artificial Sequence: Synthetic primer
tccaccatgtgtgctccattc

SEQ ID NO: 19712 - DNA, 21 bp, Artificial Sequence
  Description of Artificial Sequence: Synthetic primer
cgcgctacatcatgttcttgg

SEQ ID NO: 19713 - DNA, 21 bp, Artificial Sequence
  Description of Artificial Sequence: Synthetic primer
tgtctgtcttggcagaggact

SEQ ID NO: 19714 - DNA, 23 bp, Artificial Sequence
  Description of Artificial Sequence: Synthetic primer
cccatctcttgcttctttcaagc

SEQ ID NO: 19715 - DNA, 19 bp, Artificial Sequence
  Description of Artificial Sequence: Synthetic primer
ctgttgtcggaagcgtgag

SEQ ID NO: 19716 - DNA, 25 bp, Artificial Sequence
  Description of Artificial Sequence: Synthetic primer
tgctgggatcatctacaaggagtat

SEQ ID NO: 19717 - DNA, 27 bp, Artificial Sequence
  Description of Artificial Sequence: Synthetic primer
tgatgaaaggatggttcaagagttctg

SEQ ID NO: 19718 - DNA, 23 bp, Artificial Sequence
  Description of Artificial Sequence: Synthetic primer
acgtgagagcaccaaataagagg

SEQ ID NO: 19719 - DNA, 19 bp, Artificial Sequence
  Description of Artificial Sequence: Synthetic primer
tccttgagcttcccctcca

SEQ ID NO: 19720 - DNA, 18 bp, Artificial Sequence
  Description of Artificial Sequence: Synthetic primer
tcctcaacttgcctcgga

SEQ ID NO: 19721 - DNA, 30 bp, Artificial Sequence
  Description of Artificial Sequence: Synthetic primer
acatggaaatcagtcaaatgtacatgatct

SEQ ID NO: 19722 - DNA, 19 bp, Artificial Sequence
  Description of Artificial Sequence: Synthetic primer
gtgatgaagccgctgaggt

SEQ ID NO: 19723 - DNA, 29 bp, Artificial Sequence
  Description of Artificial Sequence: Synthetic primer
ttgactcggatttatttagattcggatgt

SEQ ID NO: 19724 - DNA, 24 bp, Artificial Sequence
  Description of Artificial Sequence: Synthetic primer
acaatggcctgatacgaagtctag

SEQ ID NO: 19725 - DNA, 21 bp, Artificial Sequence
  Description of Artificial Sequence: Synthetic primer
gcagggatgggaagttcttca

SEQ ID NO: 19726 - DNA, 21 bp, Artificial Sequence
  Description of Artificial Sequence: Synthetic primer
tacccagggcgttgtcatttg

SEQ ID NO: 19727 - DNA, 22 bp, Artificial Sequence
  Description of Artificial Sequence: Synthetic primer
gtgcagaataacccgaaaagcc

SEQ ID NO: 19728 - DNA, 28 bp, Artificial Sequence
  Description of Artificial Sequence: Synthetic primer
gggttgaaactcgagaagaataatcaca

SEQ ID NO: 19729 - DNA, 23 bp, Artificial Sequence
  Description of Artificial Sequence: Synthetic primer
tcctttccctttttcgaggtcaa

SEQ ID NO: 19730 - DNA, 24 bp, Artificial Sequence
  Description of Artificial Sequence: Synthetic primer
cagtctaggctacaacaacaacag

SEQ ID NO: 19731 - DNA, 21 bp, Artificial Sequence
  Description of Artificial Sequence: Synthetic primer
cgtctgcgacatacctttcct

SEQ ID NO: 19732 - DNA, 26 bp, Artificial Sequence
  Description of Artificial Sequence: Synthetic primer
tcaagaagcttcagatcatgatgacc

SEQ ID NO: 19733 - DNA, 19 bp, Artificial Sequence
  Description of Artificial Sequence: Synthetic primer
gtggaggacaacggtctcg

SEQ ID NO: 19734 - DNA, 23 bp, Artificial Sequence
  Description of Artificial Sequence: Synthetic primer
gtctcgtttccaggagaacatca

SEQ ID NO: 19735 - DNA, 25 bp, Artificial Sequence
  Description of Artificial Sequence: Synthetic primer
acaactcctcgattcaatttcacga

SEQ ID NO: 19736 - DNA, 25 bp, Artificial Sequence
  Description of Artificial Sequence: Synthetic primer
ggtcaacaggctcctcatcataatt

SEQ ID NO: 19737 - DNA, 27 bp, Artificial Sequence
  Description of Artificial Sequence: Synthetic primer
tgatgacattgttactctttgctacga

SEQ ID NO: 19738 - DNA, 27 bp, Artificial Sequence
  Description of Artificial Sequence: Synthetic primer
tgctaacaagtacaactcactctaagc

SEQ ID NO: 19739 - DNA, 18 bp, Artificial Sequence
  Description of Artificial Sequence: Synthetic primer
tccagtcccggagttggc

SEQ ID NO: 19740 - DNA, 21 bp, Artificial Sequence
  Description of Artificial Sequence: Synthetic primer
taatcagcagggaacctccga

SEQ ID NO: 19741 - DNA, 23 bp, Artificial Sequence
  Description of Artificial Sequence: Synthetic primer
ggaatgttttgacactccttgct

SEQ ID NO: 19742 - DNA, 21 bp, Artificial Sequence
  Description of Artificial Sequence: Synthetic primer
catcacttgtcgcagagcctt

SEQ ID NO: 19743 - DNA, 21 bp, Artificial Sequence
  Description of Artificial Sequence: Synthetic primer
ctgtgtccttgactgcgagtt

SEQ ID NO: 19744 - DNA, 22 bp, Artificial Sequence
  Description of Artificial Sequence: Synthetic primer
cggagacaggcaacttatcctt

SEQ ID NO: 19745 - DNA, 21 bp, Artificial Sequence
  Description of Artificial Sequence: Synthetic primer
ttcccggttgcaaaggtaaca

SEQ ID NO: 19746 - DNA, 21 bp, Artificial Sequence
  Description of Artificial Sequence: Synthetic primer
gtagatgtcgaccttcaccga

SEQ ID NO: 19747 - DNA, 22 bp, Artificial Sequence
  Description of Artificial Sequence: Synthetic primer
gctggatcaaaggcacctttac

SEQ ID NO: 19748 - DNA, 24 bp, Artificial Sequence
  Description of Artificial Sequence: Synthetic primer
tgataagaggctccattgcttcaa

SEQ ID NO: 19749 - DNA, 29 bp, Artificial Sequence
  Description of Artificial Sequence: Synthetic primer
cctctccattattatttctctccctttca

SEQ ID NO: 19750 - DNA, 21 bp, Artificial Sequence
  Description of Artificial Sequence: Synthetic primer
gttgggtcaccagcttagtgg

SEQ ID NO: 19751 - DNA, 28 bp, Artificial Sequence
  Description of Artificial Sequence: Synthetic primer
tttgaactttactagccctttcatagga

SEQ ID NO: 19752 - DNA, 21 bp, Artificial Sequence
  Description of Artificial Sequence: Synthetic primer
cacccagtcgtcatcatcacc

SEQ ID NO: 19753 - DNA, 18 bp, Artificial Sequence
  Description of Artificial Sequence: Synthetic primer
tgccttcatgctcgcagt

SEQ ID NO: 19754 - DNA, 22 bp, Artificial Sequence
  Description of Artificial Sequence: Synthetic primer
gccccttttctaaggtcccttg

SEQ ID NO: 19755 - DNA, 28 bp, Artificial Sequence
  Description of Artificial Sequence: Synthetic primer
gctgctagctatctagtagatccataca

SEQ ID NO: 19756 - DNA, 21 bp, Artificial Sequence
  Description of Artificial Sequence: Synthetic primer
ggcagagacgagctagtttcc

SEQ ID NO: 19757 - DNA, 20 bp, Artificial Sequence
  Description of Artificial Sequence: Synthetic primer
ccccttcatcgtctgacagg

SEQ ID NO: 19758 - DNA, 26 bp, Artificial Sequence
  Description of Artificial Sequence: Synthetic primer
caatgcaacattatcaggtaagctgt

SEQ ID NO: 19759 - DNA, 21 bp, Artificial Sequence
  Description of Artificial Sequence: Synthetic primer
acgaagacgaagtcgaaggtg

SEQ ID NO: 19760 - DNA, 25 bp, Artificial Sequence
  Description of Artificial Sequence: Synthetic primer
acaaaggagctaaacaatggcaatc

SEQ ID NO: 19761 - DNA, 20 bp, Artificial Sequence
  Description of Artificial Sequence: Synthetic primer
tcccagctgcaaactgaaac

SEQ ID NO: 19762 - DNA, 22 bp, Artificial Sequence
  Description of Artificial Sequence: Synthetic primer
gcagaaagcgattccaatcgtt

SEQ ID NO: 19763 - DNA, 22 bp, Artificial Sequence
  Description of Artificial Sequence: Synthetic primer
aggtaatgtgtgcttccctacc

SEQ ID NO: 19764 - DNA, 27 bp, Artificial Sequence
  Description of Artificial Sequence: Synthetic primer
tgtagataatctcaatcccttcaggtg

SEQ ID NO: 19765 - DNA, 19 bp, Artificial Sequence
  Description of Artificial Sequence: Synthetic primer
ctggtcctcacgcatccac

SEQ ID NO: 19766 - DNA, 26 bp, Artificial Sequence
  Description of Artificial Sequence: Synthetic primer
agtgttgttctctcgtagatgaaagc

SEQ ID NO: 19767 - DNA, 26 bp, Artificial Sequence
  Description of Artificial Sequence: Synthetic primer
ttttggttcacaatttgttcatgctg

SEQ ID NO: 19768 - DNA, 23 bp, Artificial Sequence
  Description of Artificial Sequence: Synthetic primer
caaggaaaaagtcacatctcgca

SEQ ID NO: 19769 - DNA, 22 bp, Artificial Sequence
  Description of Artificial Sequence: Synthetic primer
ccatcgtctcgatgcatttcag

SEQ ID NO: 19770 - DNA, 21 bp, Artificial Sequence
  Description of Artificial Sequence: Synthetic primer
cgaaggagatcgtgatcccaa

SEQ ID NO: 19771 - DNA, 22 bp, Artificial Sequence
  Description of Artificial Sequence: Synthetic primer
accctcggaaggagaacagtat

SEQ ID NO: 19772 - DNA, 27 bp, Artificial Sequence
  Description of Artificial Sequence: Synthetic primer
caaacttctttgtgttcagcatctctt

SEQ ID NO: 19773 - DNA, 27 bp, Artificial Sequence
  Description of Artificial Sequence: Synthetic primer
caccatacccatatccagctagtttag

SEQ ID NO: 19774 - DNA, 21 bp, Artificial Sequence
  Description of Artificial Sequence: Synthetic primer
aatgtaccctttaccgcaggt

SEQ ID NO: 19775 - DNA, 27 bp, Artificial Sequence
  Description of Artificial Sequence: Synthetic primer
aacaagtatgcatccagaatgttcaag

SEQ ID NO: 19776 - DNA, 23 bp, Artificial Sequence
  Description of Artificial Sequence: Synthetic primer
gtgtttgacagactccgttgatc

SEQ ID NO: 19777 - DNA, 21 bp, Artificial Sequence
  Description of Artificial Sequence: Synthetic primer
ccacattcattagccccttgc

SEQ ID NO: 19778 - DNA, 25 bp, Artificial Sequence
  Description of Artificial Sequence: Synthetic primer
acagcacagtagcaatctatgatgc

SEQ ID NO: 19779 - DNA, 21 bp, Artificial Sequence
  Description of Artificial Sequence: Synthetic primer
gtacgagatgccctgtatccc

SEQ ID NO: 19780 - DNA, 24 bp, Artificial Sequence
  Description of Artificial Sequence: Synthetic primer
gtgcgatgatgaaaacaataggca

SEQ ID NO: 19781 - DNA, 24 bp, Artificial Sequence
  Description of Artificial Sequence: Synthetic primer
ccacacttctatcttccacatggg

SEQ ID NO: 19782 - DNA, 24 bp, Artificial Sequence
  Description of Artificial Sequence: Synthetic primer
tgcagacaataagcgtgttacatg

SEQ ID NO: 19783 - DNA, 21 bp, Artificial Sequence
  Description of Artificial Sequence: Synthetic primer
cagtgaccaaattgccgtcct

SEQ ID NO: 19784 - DNA, 21 bp, Artificial Sequence
  Description of Artificial Sequence: Synthetic primer
gaggttcttccgcgagaagag

SEQ ID NO: 19785 - DNA, 23 bp, Artificial Sequence
  Description of Artificial Sequence: Synthetic primer
agaatacccctccagcaatgcta

SEQ ID NO: 19786 - DNA, 28 bp, Artificial Sequence
  Description of Artificial Sequence: Synthetic primer
tgatttagtttagaagctgacaaagcct

SEQ ID NO: 19787 - DNA, 19 bp, Artificial Sequence
  Description of Artificial Sequence: Synthetic primer
actcgaaatccgccgagac

SEQ ID NO: 19788 - DNA, 26 bp, Artificial Sequence
  Description of Artificial Sequence: Synthetic primer
gcatatgtttcctcacgaaagatgac

SEQ ID NO: 19789 - DNA, 24 bp, Artificial Sequence
  Description of Artificial Sequence: Synthetic primer
ctgatcagaaagcagtggaacatg

SEQ ID NO: 19790 - DNA, 28 bp, Artificial Sequence
  Description of Artificial Sequence: Synthetic primer
gaatctctctgtgtgaaagaacatttgt

SEQ ID NO: 19791 - DNA, 19 bp, Artificial Sequence
  Description of Artificial Sequence: Synthetic primer
catccactgtcgctggctt

SEQ ID NO: 19792 - DNA, 22 bp, Artificial Sequence
  Description of Artificial Sequence: Synthetic primer
agcaatcgtaatgggttgacca

SEQ ID NO: 19793 - DNA, 23 bp, Artificial Sequence
  Description of Artificial Sequence: Synthetic primer
tcgaaagcagattagcacctcat

SEQ ID NO: 19794 - DNA, 23 bp, Artificial Sequence
  Description of Artificial Sequence: Synthetic primer
gctccgatgacatgatcttcctc

SEQ ID NO: 19795 - DNA, 25 bp, Artificial Sequence
  Description of Artificial Sequence: Synthetic primer
tggtgtcttcttcagattgaaccat

SEQ ID NO: 19796 - DNA, 26 bp, Artificial Sequence
  Description of Artificial Sequence: Synthetic primer
accccctctaattactacaaatgcac

SEQ ID NO: 19797 - DNA, 21 bp, Artificial Sequence
  Description of Artificial Sequence: Synthetic primer
ccttttgcaggctccttcact

SEQ ID NO: 19798 - DNA, 21 bp, Artificial Sequence
  Description of Artificial Sequence: Synthetic primer
tttgtcacctccttggcgaaa

SEQ ID NO: 19799 - DNA, 21 bp, Artificial Sequence
  Description of Artificial Sequence: Synthetic primer
gcaaagtcagagcggtcttgt

SEQ ID NO: 19800 - DNA, 27 bp, Artificial Sequence
  Description of Artificial Sequence: Synthetic primer
gagcatttactaggccacaaaatcatg

SEQ ID NO: 19801 - DNA, 28 bp, Artificial Sequence
  Description of Artificial Sequence: Synthetic primer
acgaaactttgaaccctgctacaatata

SEQ ID NO: 19802 - DNA, 24 bp, Artificial Sequence
  Description of Artificial Sequence: Synthetic primer
ccatgaaatacgattggtggagca

SEQ ID NO: 19803 - DNA, 21 bp, Artificial Sequence
  Description of Artificial Sequence: Synthetic primer
tgtcgttagctgtggaactca

SEQ ID NO: 19804 - DNA, 22 bp, Artificial Sequence
  Description of Artificial Sequence: Synthetic primer
tgaggtgcttgatgtcgtagac

SEQ ID NO: 19805 - DNA, 20 bp, Artificial Sequence
  Description of Artificial Sequence: Synthetic primer
tgttgatggtcctggcgaag

SEQ ID NO: 19806 - DNA, 23 bp, Artificial Sequence
  Description of Artificial Sequence: Synthetic primer
tggatgctaacaaaactggcaga

SEQ ID NO: 19807 - DNA, 19 bp, Artificial Sequence
  Description of Artificial Sequence: Synthetic primer
ttcgagctggccagagagg

SEQ ID NO: 19808 - DNA, 27 bp, Artificial Sequence
  Description of Artificial Sequence: Synthetic primer
aagcttcctaatggaaacaactatcgc

SEQ ID NO: 19809 - DNA, 21 bp, Artificial Sequence
  Description of Artificial Sequence: Synthetic primer
caatgcctcgaaccgatcttg

SEQ ID NO: 19810 - DNA, 26 bp, Artificial Sequence
  Description of Artificial Sequence: Synthetic primer
ggaaatgtaggttgccaaatctttcg

SEQ ID NO: 19811 - DNA, 21 bp, Artificial Sequence
  Description of Artificial Sequence: Synthetic primer
caggtgcgacaagcttcttca

SEQ ID NO: 19812 - DNA, 21 bp, Artificial Sequence
  Description of Artificial Sequence: Synthetic primer
catgtggccagcattgtgaac

SEQ ID NO: 19813 - DNA, 22 bp, Artificial Sequence
  Description of Artificial Sequence: Synthetic primer
ggtccgtaagacgagcttgtaa

SEQ ID NO: 19814 - DNA, 21 bp, Artificial Sequence
  Description of Artificial Sequence: Synthetic primer
gtatcgttgctgcttcctgct

SEQ ID NO: 19815 - DNA, 27 bp, Artificial Sequence
  Description of Artificial Sequence: Synthetic primer
agtatgaatgaaggtgaagaagtcctc

SEQ ID NO: 19816 - DNA, 23 bp, Artificial Sequence
  Description of Artificial Sequence: Synthetic primer
cccgtgccttgctagttactatg

SEQ ID NO: 19817 - DNA, 21 bp, Artificial Sequence
  Description of Artificial Sequence: Synthetic primer
tacaagatctagctgccgcat

SEQ ID NO: 19818 - DNA, 19 bp, Artificial Sequence
  Description of Artificial Sequence: Synthetic primer
gagccgccctctttcttga

SEQ ID NO: 19819 - DNA, 21 bp, Artificial Sequence
  Description of Artificial Sequence: Synthetic primer
gggagctccatttcatgtcca

SEQ ID NO: 19820 - DNA, 22 bp, Artificial Sequence
  Description of Artificial Sequence: Synthetic primer
tgaagcagcacattctggatga

SEQ ID NO: 19821 - DNA, 23 bp, Artificial Sequence
  Description of Artificial Sequence: Synthetic primer
tggtcatgatggtgtaggtttcc

SEQ ID NO: 19822 - DNA, 23 bp, Artificial Sequence
  Description of Artificial Sequence: Synthetic primer
gcacttcttacctatgggcaact

SEQ ID NO: 19823 - DNA, 21 bp, Artificial Sequence
  Description of Artificial Sequence: Synthetic primer
cgaaacgagttgccgtgattt

SEQ ID NO: 19824 - DNA, 24 bp, Artificial Sequence
  Description of Artificial Sequence: Synthetic primer
agtatgatcgatccaagcttccag

SEQ ID NO: 19825 - DNA, 25 bp, Artificial Sequence
  Description of Artificial Sequence: Synthetic primer
ggcagagattggcacatataacttg

SEQ ID NO: 19826 - DNA, 23 bp, Artificial Sequence
  Description of Artificial Sequence: Synthetic primer
agtactccttaggaagcaacagc

SEQ ID NO: 19827 - DNA, 22 bp, Artificial Sequence
  Description of Artificial Sequence: Synthetic primer
cacagcctatgagaggaacagt

SEQ ID NO: 19828 - DNA, 24 bp, Artificial Sequence
  Description of Artificial Sequence: Synthetic primer
cgattggttgcgattaagcatact

SEQ ID NO: 19829 - DNA, 23 bp, Artificial Sequence
  Description of Artificial Sequence: Synthetic primer
tcaaacaattcaccacgaccatg

SEQ ID NO: 19830 - DNA, 21 bp, Artificial Sequence
  Description of Artificial Sequence: Synthetic primer
cctcatgacagccgtcgttaa

SEQ ID NO: 19831 - DNA, 23 bp, Artificial Sequence
  Description of Artificial Sequence: Synthetic primer
ggtaggtatgaacggctacatcc

SEQ ID NO: 19832 - DNA, 24 bp, Artificial Sequence
  Description of Artificial Sequence: Synthetic primer
aggtcattagacttcagcattccc

SEQ ID NO: 19833 - DNA, 21 bp, Artificial Sequence
  Description of Artificial Sequence: Synthetic primer
tgctagtagctctgcctccaa

SEQ ID NO: 19834 - DNA, 26 bp, Artificial Sequence
  Description of Artificial Sequence: Synthetic primer
tgtttttccttctcaacgtcaaactt

SEQ ID NO: 19835 - DNA, 22 bp, Artificial Sequence
  Description of Artificial Sequence: Synthetic primer
tcagtacttgcaatctggccat

SEQ ID NO: 19836 - DNA, 22 bp, Artificial Sequence
  Description of Artificial Sequence: Synthetic primer
ctcgctgctttcatcatccaag

SEQ ID NO: 19837 - DNA, 21 bp, Artificial Sequence
  Description of Artificial Sequence: Synthetic primer
gccagagcctcatcacatgaa

SEQ ID NO: 19838 - DNA, 27 bp, Artificial Sequence
  Description of Artificial Sequence: Synthetic primer
cttttctacccttcacatttacaaccg

SEQ ID NO: 19839 - DNA, 22 bp, Artificial Sequence
  Description of Artificial Sequence: Synthetic primer
tgcagggtttagttctgtgacc

SEQ ID NO: 19840 - DNA, 22 bp, Artificial Sequence
  Description of Artificial Sequence: Synthetic primer
ggaactcagtgtaggagtggac

SEQ ID NO: 19841 - DNA, 27 bp, Artificial Sequence
  Description of Artificial Sequence: Synthetic primer
acaggctagataccaaaaagaaaaggt

SEQ ID NO: 19842 - DNA, 21 bp, Artificial Sequence
  Description of Artificial Sequence: Synthetic primer
cgcctccaaatccagcatgta

SEQ ID NO: 19843 - DNA, 24 bp, Artificial Sequence
  Description of Artificial Sequence: Synthetic primer
cccttcttcttctccattgcactt

SEQ ID NO: 19844 - DNA, 21 bp, Artificial Sequence
  Description of Artificial Sequence: Synthetic primer
ccatggtgctctctgtgtcat

SEQ ID NO: 19845 - DNA, 28 bp, Artificial Sequence
  Description of Artificial Sequence: Synthetic primer
ctccaagaggttgatggatcattattct

SEQ ID NO: 19846 - DNA, 22 bp, Artificial Sequence
  Description of Artificial Sequence: Synthetic primer
ctggcatgttcgcatgaagatt

SEQ ID NO: 19847 - DNA, 21 bp, Artificial Sequence
  Description of Artificial Sequence: Synthetic primer
agatgtcaagcccatcaagcc

SEQ ID NO: 19848 - DNA, 21 bp, Artificial Sequence
  Description of Artificial Sequence: Synthetic primer
ctcctccttctccccgtacag

SEQ ID NO: 19849 - DNA, 21 bp, Artificial Sequence
  Description of Artificial Sequence: Synthetic primer
gatgaactacgctgcaagctc

SEQ ID NO: 19850 - DNA, 21 bp, Artificial Sequence
  Description of Artificial Sequence: Synthetic primer
agccttctcgatcacaggtct

SEQ ID NO: 19851 - DNA, 28 bp, Artificial Sequence
  Description of Artificial Sequence: Synthetic primer
gctccctataaatgtcacgtacaaatga

SEQ ID NO: 19852 - DNA, 23 bp, Artificial Sequence
  Description of Artificial Sequence: Synthetic primer
ggctttaaatctggtgcactgaa

SEQ ID NO: 19853 - DNA, 22 bp, Artificial Sequence
  Description of Artificial Sequence: Synthetic primer
gctaggcatgctcaagttcatg

SEQ ID NO: 19854 - DNA, 27 bp, Artificial Sequence
  Description of Artificial Sequence: Synthetic primer
gcctgtaatgttgtcgaatacaatgtc

SEQ ID NO: 19855 - DNA, 24 bp, Artificial Sequence
  Description of Artificial Sequence: Synthetic primer
caccatggtccatatcggaatttg

SEQ ID NO: 19856 - DNA, 24 bp, Artificial Sequence
  Description of Artificial Sequence: Synthetic primer
ttgtgacttttgtcaatccactcg

SEQ ID NO: 19857 - DNA, 26 bp, Artificial Sequence
  Description of Artificial Sequence: Synthetic primer
cctcaggctacttaccaaaatttagc

SEQ ID NO: 19858 - DNA, 27 bp, Artificial Sequence
  Description of Artificial Sequence: Synthetic primer
tgcgcaacaaccaaataagaagaatag

SEQ ID NO: 19859 - DNA, 21 bp, Artificial Sequence
  Description of Artificial Sequence: Synthetic primer
ggagcactgaagcaggatttc

SEQ ID NO: 19860 - DNA, 22 bp, Artificial Sequence
  Description of Artificial Sequence: Synthetic primer
cctgaatgattggcgggaaaaa

SEQ ID NO: 19861 - DNA, 26 bp, Artificial Sequence
  Description of Artificial Sequence: Synthetic primer
tgaatttgagagtcatctgagctcat

SEQ ID NO: 19862 - DNA, 28 bp, Artificial Sequence
  Description of Artificial Sequence: Synthetic primer
gcataagccacattctctaatacatcag

SEQ ID NO: 19863 - DNA, 23 bp, Artificial Sequence
  Description of Artificial Sequence: Synthetic primer
gaatgaagagactagcaggagca

SEQ ID NO: 19864 - DNA, 21 bp, Artificial Sequence
  Description of Artificial Sequence: Synthetic primer
ggacttgtgtttggtcaggct

SEQ ID NO: 19865 - DNA, 24 bp, Artificial Sequence
  Description of Artificial Sequence: Synthetic primer
gaagaggctccttcggtaatgatt

SEQ ID NO: 19866 - DNA, 26 bp, Artificial Sequence
  Description of Artificial Sequence: Synthetic primer
ccatcactaaatcctatccactaccc

SEQ ID NO: 19867 - DNA, 28 bp, Artificial Sequence
  Description of Artificial Sequence: Synthetic primer
gatcctctgcattgaactacaactatct

SEQ ID NO: 19868 - DNA, 21 bp, Artificial Sequence
  Description of Artificial Sequence: Synthetic primer
cgctgtctttcttcggcttga

SEQ ID NO: 19869 - DNA, 25 bp, Artificial Sequence
  Description of Artificial Sequence: Synthetic primer
gggcgatcatcacaacgtaaaatag

SEQ ID NO: 19870 - DNA, 23 bp, Artificial Sequence
  Description of Artificial Sequence: Synthetic primer
tggtgacatagttccagttgcat

SEQ ID NO: 19871 - DNA, 22 bp, Artificial Sequence
  Description of Artificial Sequence: Synthetic primer
ttcgtgaatcctgatctggtgt

SEQ ID NO: 19872 - DNA, 27 bp, Artificial Sequence
  Description of Artificial Sequence: Synthetic primer
ttctgcctttgcaaatatcaaaactct

SEQ ID NO: 19873 - DNA, 21 bp, Artificial Sequence
  Description of Artificial Sequence: Synthetic primer
ttttgctgccactgcttctct

SEQ ID NO: 19874 - DNA, 21 bp, Artificial Sequence
  Description of Artificial Sequence: Synthetic primer
tagtacaccgtaaccgcgatg

SEQ ID NO: 19875 - DNA, 22 bp, Artificial Sequence
  Description of Artificial Sequence: Synthetic primer
gtcatgactgcccaaatatccc

SEQ ID NO: 19876 - DNA, 26 bp, Artificial Sequence
  Description of Artificial Sequence: Synthetic primer
ccacctggattgtactctccaaatag

SEQ ID NO: 19877 - DNA, 22 bp, Artificial Sequence
  Description of Artificial Sequence: Synthetic primer
gatcctcttccagaaccagtgc

SEQ ID NO: 19878 - DNA, 24 bp, Artificial Sequence
  Description of Artificial Sequence: Synthetic primer
ggatatactagtgccgaactggag

SEQ ID NO: 19879 - DNA, 27 bp, Artificial Sequence
  Description of Artificial Sequence: Synthetic primer
accaaagtatttcaccaaaagttcacc

SEQ ID NO: 19880 - DNA, 19 bp, Artificial Sequence
  Description of Artificial Sequence: Synthetic primer
gacctgtgcacctctctcg

SEQ ID NO: 19881 - DNA, 22 bp, Artificial Sequence
  Description of Artificial Sequence: Synthetic primer
ggcatgtgacaagaagttctcg

SEQ ID NO: 19882 - DNA, 21 bp, Artificial Sequence
  Description of Artificial Sequence: Synthetic primer
agcgctgcttaatgcgtattg

SEQ ID NO: 19883 - DNA, 21 bp, Artificial Sequence
  Description of Artificial Sequence: Synthetic primer
agcctgtaggataaggacgct

SEQ ID NO: 19884 - DNA, 27 bp, Artificial Sequence
  Description of Artificial Sequence: Synthetic primer
aaatatcttcctagcctttaggtaccg

SEQ ID NO: 19885 - DNA, 23 bp, Artificial Sequence
  Description of Artificial Sequence: Synthetic primer
aacgacggtgtttgattcatcag

SEQ ID NO: 19886 - DNA, 21 bp, Artificial Sequence
  Description of Artificial Sequence: Synthetic primer
acggagaagtacatgcagcaa

SEQ ID NO: 19887 - DNA, 21 bp, Artificial Sequence
  Description of Artificial Sequence: Synthetic primer
catgaggctgttgacctctgg

SEQ ID NO: 19888 - DNA, 21 bp, Artificial Sequence
  Description of Artificial Sequence: Synthetic primer
cacacgatacaagggcgtctc

SEQ ID NO: 19889 - DNA, 27 bp, Artificial Sequence
  Description of Artificial Sequence: Synthetic primer
catacacaacataagctaaggttctgc

SEQ ID NO: 19890 - DNA, 23 bp, Artificial Sequence
  Description of Artificial Sequence: Synthetic primer
gcagttgcttcaccaaagaaaac

SEQ ID NO: 19891 - DNA, 21 bp, Artificial Sequence
  Description of Artificial Sequence: Synthetic primer
ctccgagctcgaagagttcag

SEQ ID NO: 19892 - DNA, 25 bp, Artificial Sequence
  Description of Artificial Sequence: Synthetic primer
cctcaatccactccaaattttgcag

SEQ ID NO: 19893 - DNA, 24 bp, Artificial Sequence
  Description of Artificial Sequence: Synthetic primer
ccatccaaacgagtgagaactact

SEQ ID NO: 19894 - DNA, 24 bp, Artificial Sequence
  Description of Artificial Sequence: Synthetic primer
aggaacaaagcttcagacagatga

SEQ ID NO: 19895 - DNA, 27 bp, Artificial Sequence
  Description of Artificial Sequence: Synthetic primer
caaatgcatactgttactgcctttagt

SEQ ID NO: 19896 - DNA, 25 bp, Artificial Sequence
  Description of Artificial Sequence: Synthetic primer
ggagcaaactggattgtgtttgaat

SEQ ID NO: 19897 - DNA, 26 bp, Artificial Sequence
  Description of Artificial Sequence: Synthetic primer
cctaacccgtacatttggtcagttat

SEQ ID NO: 19898 - DNA, 22 bp, Artificial Sequence
  Description of Artificial Sequence: Synthetic primer
gctctctgtcactgagcctatc

SEQ ID NO: 19899 - DNA, 21 bp, Artificial Sequence
  Description of Artificial Sequence: Synthetic primer
ggagcagtcctttgtgacctg

SEQ ID NO: 19900 - DNA, 21 bp, Artificial Sequence
  Description of Artificial Sequence: Synthetic primer
ggaagagagacccatcgagtg

SEQ ID NO: 19901 - DNA, 21 bp, Artificial Sequence
  Description of Artificial Sequence: Synthetic primer
gtctggcaacagtagctctcg

SEQ ID NO: 19902 - DNA, 21 bp, Artificial Sequence
  Description of Artificial Sequence: Synthetic primer
ccaaccctagaacggaagctg

SEQ ID NO: 19903 - DNA, 22 bp, Artificial Sequence
  Description of Artificial Sequence: Synthetic primer
cgtccaaatgttgcgaaacagg

SEQ ID NO: 19904 - DNA, 23 bp, Artificial Sequence
  Description of Artificial Sequence: Synthetic primer
caagcaatttggcagaaccaatc

SEQ ID NO: 19905 - DNA, 22 bp, Artificial Sequence
  Description of Artificial Sequence: Synthetic primer
gataacatcagaccacgccatg

SEQ ID NO: 19906 - DNA, 19 bp, Artificial Sequence
  Description of Artificial Sequence: Synthetic primer
acggatgttgtcgaagcca

SEQ ID NO: 19907 - DNA, 22 bp, Artificial Sequence
  Description of Artificial Sequence: Synthetic primer
caaggcctgcatatggaaatgg

SEQ ID NO: 19908 - DNA, 22 bp, Artificial Sequence
  Description of Artificial Sequence: Synthetic primer
ctcagttggcttttgcagaagt

SEQ ID NO: 19909 - DNA, 27 bp, Artificial Sequence
  Description of Artificial Sequence: Synthetic primer
gaaacacggcagttcttcaaatctaat

SEQ ID NO: 19910 - DNA, 21 bp, Artificial Sequence
  Description of Artificial Sequence: Synthetic primer
catgcggatgaaaccaccaat

SEQ ID NO: 19911 - DNA, 28 bp, Artificial Sequence
  Description of Artificial Sequence: Synthetic primer
aatcttttattttcagtggactcagcaa

SEQ ID NO: 19912 - DNA, 23 bp, Artificial Sequence
  Description of Artificial Sequence: Synthetic primer
ggctgaacctaagggtcagaatg

SEQ ID NO: 19913 - DNA, 23 bp, Artificial Sequence
  Description of Artificial Sequence: Synthetic primer
ttgttacttgctaccgaagttgc

SEQ ID NO: 19914 - DNA, 28 bp, Artificial Sequence
  Description of Artificial Sequence: Synthetic primer
ccaggtatcaattcaaaaggaagctcta

SEQ ID NO: 19915 - DNA, 23 bp, Artificial Sequence
  Description of Artificial Sequence: Synthetic primer
aattcacaagtttcgcagaggaa

SEQ ID NO: 19916 - DNA, 22 bp, Artificial Sequence
  Description of Artificial Sequence: Synthetic primer
gagcatctgttattcccagctc

SEQ ID NO: 19917 - DNA, 22 bp, Artificial Sequence
  Description of Artificial Sequence: Synthetic primer
ggaagctatcttctcgtcctgt

SEQ ID NO: 19918 - DNA, 22 bp, Artificial Sequence
  Description of Artificial Sequence: Synthetic primer
cagaaaacaaggctcgtccaac

SEQ ID NO: 19919 - DNA, 21 bp, Artificial Sequence
  Description of Artificial Sequence: Synthetic primer
gtctggttggccaagaaaagc

SEQ ID NO: 19920 - DNA, 25 bp, Artificial Sequence
  Description of Artificial Sequence: Synthetic primer
tctccaaaccaagtacagtactacg

SEQ ID NO: 19921 - DNA, 21 bp, Artificial Sequence
  Description of Artificial Sequence: Synthetic primer
tagaagtgcacgcttgagagc

SEQ ID NO: 19922 - DNA, 21 bp, Artificial Sequence
  Description of Artificial Sequence: Synthetic primer
gttgcaggcctgaaggattga

SEQ ID NO: 19923 - DNA, 19 bp, Artificial Sequence
  Description of Artificial Sequence: Synthetic primer
cctcggcaacatggacctt

SEQ ID NO: 19924 - DNA, 21 bp, Artificial Sequence
  Description of Artificial Sequence: Synthetic primer
cgcccaccatgtagcacatat

SEQ ID NO: 19925 - DNA, 23 bp, Artificial Sequence
  Description of Artificial Sequence: Synthetic primer
aggagttgatgtcattgcgtcat

SEQ ID NO: 19926 - DNA, 24 bp, Artificial Sequence
  Description of Artificial Sequence: Synthetic primer
ggtgtacttcgaggactaggtgta

SEQ ID NO: 19927 - DNA, 21 bp, Artificial Sequence
  Description of Artificial Sequence: Synthetic primer
ctgggactttgacgacaacac

SEQ ID NO: 19928 - DNA, 26 bp, Artificial Sequence
  Description of Artificial Sequence: Synthetic primer
cggttatgctgttacgccatttattt

SEQ ID NO: 19929 - DNA, 25 bp, Artificial Sequence
  Description of Artificial Sequence: Synthetic primer
gtggtagattctactgtcattggct

SEQ ID NO: 19930 - DNA, 23 bp, Artificial Sequence
  Description of Artificial Sequence: Synthetic primer
ccattctcttgatcggtcatcgt

SEQ ID NO: 19931 - DNA, 26 bp, Artificial Sequence
  Description of Artificial Sequence: Synthetic primer
ccttttagttatgcacggtagtcgta

SEQ ID NO: 19932 - DNA, 25 bp, Artificial Sequence
  Description of Artificial Sequence: Synthetic primer
tccgctgaaaacatttgaccatttc

SEQ ID NO: 19933 - DNA, 28 bp, Artificial Sequence
  Description of Artificial Sequence: Synthetic primer
ttggattctcctggaaatcaattaacac

SEQ ID NO: 19934 - DNA, 24 bp, Artificial Sequence
  Description of Artificial Sequence: Synthetic primer
cgatcaatttatcgatggccaacg

SEQ ID NO: 19935 - DNA, 24 bp, Artificial Sequence
  Description of Artificial Sequence: Synthetic primer
gggctgaatctgtcagtttgacat

SEQ ID NO: 19936 - DNA, 27 bp, Artificial Sequence
  Description of Artificial Sequence: Synthetic primer
gggtatcttcggctagaattaaactca

SEQ ID NO: 19937 - DNA, 22 bp, Artificial Sequence
  Description of Artificial Sequence: Synthetic primer
tgttcctttgtggagctcatcg

SEQ ID NO: 19938 - DNA, 21 bp, Artificial Sequence
  Description of Artificial Sequence: Synthetic primer
tccacaggtccaccatccata

SEQ ID NO: 19939 - DNA, 25 bp, Artificial Sequence
  Description of Artificial Sequence: Synthetic primer
cctcatactgctgtacatacggact

SEQ ID NO: 19940 - DNA, 27 bp, Artificial Sequence
  Description of Artificial Sequence: Synthetic primer
tcaccaagaaagctatcatcatgatct

SEQ ID NO: 19941 - DNA, 21 bp, Artificial Sequence
  Description of Artificial Sequence: Synthetic primer
accagatctgccccaatgatc

SEQ ID NO: 19942 - DNA, 25 bp, Artificial Sequence
  Description of Artificial Sequence: Synthetic primer
cacttaattctgtgcacatgcatga

SEQ ID NO: 19943 - DNA, 21 bp, Artificial Sequence
  Description of Artificial Sequence: Synthetic primer
tggctacagcaatgaggaaca

SEQ ID NO: 19944 - DNA, 22 bp, Artificial Sequence
  Description of Artificial Sequence: Synthetic primer
gccatcaggattgccaatatcg

SEQ ID NO: 19945 - DNA, 23 bp, Artificial Sequence
  Description of Artificial Sequence: Synthetic primer
aggtattcaaagacccgatgtgt

SEQ ID NO: 19946 - DNA, 21 bp, Artificial Sequence
  Description of Artificial Sequence: Synthetic primer
ctgatggagtgcagtcactga

SEQ ID NO: 19947 - DNA, 23 bp, Artificial Sequence
  Description of Artificial Sequence: Synthetic primer
ccccttctcaatgtctgcaaagt

SEQ ID NO: 19948 - DNA, 21 bp, Artificial Sequence
  Description of Artificial Sequence: Synthetic primer
cgctggtcgagttcagtagtg

SEQ ID NO: 19949 - DNA, 20 bp, Artificial Sequence
  Description of Artificial Sequence: Synthetic primer
aggagggttggtttgctgtg

SEQ ID NO: 19950 - DNA, 21 bp, Artificial Sequence
  Description of Artificial Sequence: Synthetic primer
aacaaccaatggccttgtgtg

SEQ ID NO: 19951 - DNA, 24 bp, Artificial Sequence
  Description of Artificial Sequence: Synthetic primer
acgtacttacttctgtgcagctac

SEQ ID NO: 19952 - DNA, 24 bp, Artificial Sequence
  Description of Artificial Sequence: Synthetic primer
tcacatgctaccgtcattgtagtt

SEQ ID NO: 19953 - DNA, 28 bp, Artificial Sequence
  Description of Artificial Sequence: Synthetic primer
gcataactcaaaactcatgaacttctgt

SEQ ID NO: 19954 - DNA, 21 bp, Artificial Sequence
  Description of Artificial Sequence: Synthetic primer
cgtgtggtttacgcccagtaa

SEQ ID NO: 19955 - DNA, 27 bp, Artificial Sequence
  Description of Artificial Sequence: Synthetic primer
gacacagattatattgagatgcgcatt

SEQ ID NO: 19956 - DNA, 22 bp, Artificial Sequence
  Description of Artificial Sequence: Synthetic primer
catttcaactcctccaccctca

SEQ ID NO: 19957 - DNA, 27 bp, Artificial Sequence
  Description of Artificial Sequence: Synthetic primer
aaaagaaagctaagaaacgactaaccc

SEQ ID NO: 19958 - DNA, 21 bp, Artificial Sequence
  Description of Artificial Sequence: Synthetic primer
catgaagacggactggatccc

SEQ ID NO: 19959 - DNA, 26 bp, Artificial Sequence
  Description of Artificial Sequence: Synthetic primer
agtctcctagcataacatccttcctt

SEQ ID NO: 19960 - DNA, 27 bp, Artificial Sequence
  Description of Artificial Sequence: Synthetic primer
gcttacttatcaaagcagatactccct

SEQ ID NO: 19961 - DNA, 27 bp, Artificial Sequence
  Description of Artificial Sequence: Synthetic primer
acatatttctcctgcagagttttgtct

SEQ ID NO: 19962 - DNA, 23 bp, Artificial Sequence
  Description of Artificial Sequence: Synthetic primer
catgacagcacaatgctgcataa

SEQ ID NO: 19963 - DNA, 22 bp, Artificial Sequence
  Description of Artificial Sequence: Synthetic primer
acgggagaaagcaatacccatt

SEQ ID NO: 19964 - DNA, 25 bp, Artificial Sequence
  Description of Artificial Sequence: Synthetic primer
ccatttctcatccaaatttggcaca

SEQ ID NO: 19965 - DNA, 24 bp, Artificial Sequence
  Description of Artificial Sequence: Synthetic primer
catggcatgatctgagtctctcat

SEQ ID NO: 19966 - DNA, 27 bp, Artificial Sequence
  Description of Artificial Sequence: Synthetic primer
tgtcattgctttgatacatgtctcaac

SEQ ID NO: 19967 - DNA, 28 bp, Artificial Sequence
  Description of Artificial Sequence: Synthetic primer
tgcagtagacattttacatccaattcct

SEQ ID NO: 19968 - DNA, 22 bp, Artificial Sequence
  Description of Artificial Sequence: Synthetic primer
aggcagctacagttcagttctc

SEQ ID NO: 19969 - DNA, 21 bp, Artificial Sequence
  Description of Artificial Sequence: Synthetic primer
ccctgctgctatagtacgcat

SEQ ID NO: 19970 - DNA, 25 bp, Artificial Sequence
  Description of Artificial Sequence: Synthetic primer
tcagcttgtacttcttcctcttctc

SEQ ID NO: 19971 - DNA, 23 bp, Artificial Sequence
  Description of Artificial Sequence: Synthetic primer
aacattctcagagacaccagctt

SEQ ID NO: 19972 - DNA, 21 bp, Artificial Sequence
  Description of Artificial Sequence: Synthetic primer
catgtcattgtcttgcacgct

SEQ ID NO: 19973 - DNA, 23 bp, Artificial Sequence
  Description of Artificial Sequence: Synthetic primer
gcaaacttcgtttgtccaattgc

SEQ ID NO: 19974 - DNA, 21 bp, Artificial Sequence
  Description of Artificial Sequence: Synthetic primer
catcgacacctcatggcagaa

SEQ ID NO: 19975 - DNA, 23 bp, Artificial Sequence
  Description of Artificial Sequence: Synthetic primer
acagctggaaagtcagaaagtgt

SEQ ID NO: 19976 - DNA, 21 bp, Artificial Sequence
  Description of Artificial Sequence: Synthetic primer
catcagcttgtcaagcaccac

SEQ ID NO: 19977 - DNA, 22 bp, Artificial Sequence
  Description of Artificial Sequence: Synthetic primer
ggtcgttctaccgaagtaagcc

SEQ ID NO: 19978 - DNA, 27 bp, Artificial Sequence
  Description of Artificial Sequence: Synthetic primer
actgcttctagagatggttaaaccaat

SEQ ID NO: 19979 - DNA, 25 bp, Artificial Sequence
  Description of Artificial Sequence: Synthetic primer
cactgtcaccaaaaattcattctgc

SEQ ID NO: 19980 - DNA, 21 bp, Artificial Sequence
  Description of Artificial Sequence: Synthetic primer
gaggcggcagattcagatttg

SEQ ID NO: 19981 - DNA, 22 bp, Artificial Sequence
  Description of Artificial Sequence: Synthetic primer
gagacacgctctagttggtctt

SEQ ID NO: 19982 - DNA, 21 bp, Artificial Sequence
  Description of Artificial Sequence: Synthetic primer
tgatgatgagggagtgcctct

SEQ ID NO: 19983 - DNA, 21 bp, Artificial Sequence
  Description of Artificial Sequence: Synthetic primer
cactagagccttccacttggc

SEQ ID NO: 19984 - DNA, 20 bp, Artificial Sequence
  Description of Artificial Sequence: Synthetic primer
agaggagctcgcggatctta

SEQ ID NO: 19985 - DNA, 21 bp, Artificial Sequence
  Description of Artificial Sequence: Synthetic primer
agccccctaagacttcagctt

SEQ ID NO: 19986 - DNA, 23 bp, Artificial Sequence
  Description of Artificial Sequence: Synthetic primer
agccttgctagaaagatcatcgg

SEQ ID NO: 19987 - DNA, 27 bp, Artificial Sequence
  Description of Artificial Sequence: Synthetic primer
gacaaatgtttggtctagcatacactg

SEQ ID NO: 19988 - DNA, 19 bp, Artificial Sequence
  Description of Artificial Sequence: Synthetic primer
aggagcttcctctcccaga

SEQ ID NO: 19989 - DNA, 21 bp, Artificial Sequence
  Description of Artificial Sequence: Synthetic primer
aaccaccagggtgtatgaacg

SEQ ID NO: 19990 - DNA, 21 bp, Artificial Sequence
  Description of Artificial Sequence: Synthetic primer
cgttcagcgcttcattcgatt

SEQ ID NO: 19991 - DNA, 21 bp, Artificial Sequence
  Description of Artificial Sequence: Synthetic primer
tgctctatgacggcatcgatc

SEQ ID NO: 19992 - DNA, 21 bp, Artificial Sequence
  Description of Artificial Sequence: Synthetic primer
atccgagaggacgactccaat

SEQ ID NO: 19993 - DNA, 25 bp, Artificial Sequence
  Description of Artificial Sequence: Synthetic primer
tgcacggtatatatgtactttcggt

SEQ ID NO: 19994 - DNA, 19 bp, Artificial Sequence
  Description of Artificial Sequence: Synthetic primer
tgttcttcagctgcagcgt

SEQ ID NO: 19995 - DNA, 27 bp, Artificial Sequence
  Description of Artificial Sequence: Synthetic primer
ccacatccaaaatagtatctgcttcac

SEQ ID NO: 19996 - DNA, 26 bp, Artificial Sequence
  Description of Artificial Sequence: Synthetic primer
ccagatcgacaaaactataccagacc

SEQ ID NO: 19997 - DNA, 21 bp, Artificial Sequence
  Description of Artificial Sequence: Synthetic primer
catcttcggtagagcccagtc

SEQ ID NO: 19998 - DNA, 19 bp, Artificial Sequence
  Description of Artificial Sequence: Synthetic primer
cacacctcgcggtgcttta

SEQ ID NO: 19999 - DNA, 23 bp, Artificial Sequence
  Description of Artificial Sequence: Synthetic primer
actggaataccatatgcctggac

SEQ ID NO: 20000 - DNA, 21 bp, Artificial Sequence
  Description of Artificial Sequence: Synthetic primer
gagaagtcagggcagcaagtt

SEQ ID NO: 20001 - DNA, 27 bp, Artificial Sequence
  Description of Artificial Sequence: Synthetic primer
ggtgttaaagcttaatttgttccacga

SEQ ID NO: 20002 - DNA, 28 bp, Artificial Sequence
  Description of Artificial Sequence: Synthetic primer
ttggcatataatggtcattgatcatcgt

SEQ ID NO: 20003 - DNA, 21 bp, Artificial Sequence
  Description of Artificial Sequence: Synthetic primer
agaagctttgcttccgttggt

SEQ ID NO: 20004 - DNA, 21 bp, Artificial Sequence
  Description of Artificial Sequence: Synthetic primer
cacgagcaccgttttcaatga

SEQ ID NO: 20005 - DNA, 23 bp, Artificial Sequence
  Description of Artificial Sequence: Synthetic primer
tgatgtctgtggcaaagaatggt

SEQ ID NO: 20006 - DNA, 22 bp, Artificial Sequence
  Description of Artificial Sequence: Synthetic primer
accggcttccgaagagtataga

SEQ ID NO: 20007 - DNA, 25 bp, Artificial Sequence
  Description of Artificial Sequence: Synthetic primer
tgacttcaacagaaacaccaacatc

SEQ ID NO: 20008 - DNA, 23 bp, Artificial Sequence
  Description of Artificial Sequence: Synthetic primer
ttgtgccattgggattgaacaat

SEQ ID NO: 20009 - DNA, 28 bp, Artificial Sequence
  Description of Artificial Sequence: Synthetic primer
gtacgacgacagagaatatttaaacgtg

SEQ ID NO: 20010 - DNA, 23 bp, Artificial Sequence
  Description of Artificial Sequence: Synthetic primer
tctagcagcagcttgatatgctt

SEQ ID NO: 20011 - DNA, 23 bp, Artificial Sequence
  Description of Artificial Sequence: Synthetic primer
gtgccatccatctgtatgtacct

SEQ ID NO: 20012 - DNA, 21 bp, Artificial Sequence
  Description of Artificial Sequence: Synthetic primer
tgtccttggtctcatcagcac

SEQ ID NO: 20013 - DNA, 18 bp, Artificial Sequence
  Description of Artificial Sequence: Synthetic primer
ttctcgactccgccatgc

SEQ ID NO: 20014 - DNA, 18 bp, Artificial Sequence
  Description of Artificial Sequence: Synthetic primer
tgtcgacctcgcctaacc

SEQ ID NO: 20015 - DNA, 27 bp, Artificial Sequence
  Description of Artificial Sequence: Synthetic primer
agaaccctacatgtctactttctcagt

SEQ ID NO: 20016 - DNA, 26 bp, Artificial Sequence
  Description of Artificial Sequence: Synthetic primer
tgatcatcatctctgaaccagatcct

SEQ ID NO: 20017 - DNA, 22 bp, Artificial Sequence
  Description of Artificial Sequence: Synthetic primer
cctcttggaagagctctggatg

SEQ ID NO: 20018 - DNA, 23 bp, Artificial Sequence
  Description of Artificial Sequence: Synthetic primer
tgcaaatgatcaacggatacacc

SEQ ID NO: 20019 - DNA, 21 bp, Artificial Sequence
  Description of Artificial Sequence: Synthetic primer
cgcatctgaccccttcatgat

SEQ ID NO: 20020 - DNA, 21 bp, Artificial Sequence
  Description of Artificial Sequence: Synthetic primer
gtgcccgcagcagaaaataaa

SEQ ID NO: 20021 - DNA, 22 bp, Artificial Sequence
  Description of Artificial Sequence: Synthetic primer
tgtagcaacttgatctgagcgt

SEQ ID NO: 20022 - DNA, 21 bp, Artificial Sequence
  Description of Artificial Sequence: Synthetic primer
tatgcttatgcatccgtggca

SEQ ID NO: 20023 - DNA, 26 bp, Artificial Sequence
  Description of Artificial Sequence: Synthetic primer
ggtacatcaccggtatataacagagc

SEQ ID NO: 20024 - DNA, 21 bp, Artificial Sequence
  Description of Artificial Sequence: Synthetic primer
ccttcctccacgcgaatatcc

SEQ ID NO: 20025 - DNA, 25 bp, Artificial Sequence
  Description of Artificial Sequence: Synthetic primer
acaagatatatctgccagagttcgc

SEQ ID NO: 20026 - DNA, 24 bp, Artificial Sequence
  Description of Artificial Sequence: Synthetic primer
cgaatcaagaacctagaccccatc

SEQ ID NO: 20027 - DNA, 25 bp, Artificial Sequence
  Description of Artificial Sequence: Synthetic primer
ggacagataaatgcagaaagcttcg

SEQ ID NO: 20028 - DNA, 22 bp, Artificial Sequence
  Description of Artificial Sequence: Synthetic primer
gcttgacgaatctgaagctgag

SEQ ID NO: 20029 - DNA, 21 bp, Artificial Sequence
  Description of Artificial Sequence: Synthetic primer
ttcattcaatgctccggcctt

SEQ ID NO: 20030 - DNA, 26 bp, Artificial Sequence
  Description of Artificial Sequence: Synthetic primer
tccagcggtcagattttactaatgaa

SEQ ID NO: 20031 - DNA, 21 bp, Artificial Sequence
  Description of Artificial Sequence: Synthetic primer
acaccgacactgcaatacagc

SEQ ID NO: 20032 - DNA, 23 bp, Artificial Sequence
  Description of Artificial Sequence: Synthetic primer
agtgatggacttgagacttgagc

SEQ ID NO: 20033 - DNA, 25 bp, Artificial Sequence
  Description of Artificial Sequence: Synthetic primer
gccatgtgtattccagcactactat

SEQ ID NO: 20034 - DNA, 27 bp, Artificial Sequence
  Description of Artificial Sequence: Synthetic primer
agatagaactctattctggacctggtt

SEQ ID NO: 20035 - DNA, 27 bp, Artificial Sequence
  Description of Artificial Sequence: Synthetic primer
acctgtttaaacagttttcaccgtttt

SEQ ID NO: 20036 - DNA, 26 bp, Artificial Sequence
  Description of Artificial Sequence: Synthetic primer
agtttttgcaaactgagaatgtgtgt

SEQ ID NO: 20037 - DNA, 21 bp, Artificial Sequence
  Description of Artificial Sequence: Synthetic primer
tgagcaccagtacaacttgct

SEQ ID NO: 20038 - DNA, 21 bp, Artificial Sequence
  Description of Artificial Sequence: Synthetic primer
ggcatgctctcaccattctgt

SEQ ID NO: 20039 - DNA, 26 bp, Artificial Sequence
  Description of Artificial Sequence: Synthetic primer
agacggtatagtgttgtattgttcca

SEQ ID NO: 20040 - DNA, 26 bp, Artificial Sequence
  Description of Artificial Sequence: Synthetic primer
agagactaactaagctaacaccacca

SEQ ID NO: 20041 - DNA, 26 bp, Artificial Sequence
  Description of Artificial Sequence: Synthetic primer
cacatgtcttacttgtatggaatggc

SEQ ID NO: 20042 - DNA, 25 bp, Artificial Sequence
  Description of Artificial Sequence: Synthetic primer
actggttctcaggatctttggtaca

SEQ ID NO: 20043 - DNA, 21 bp, Artificial Sequence
  Description of Artificial Sequence: Synthetic primer
gggagagcgatacttgtcgtc

SEQ ID NO: 20044 - DNA, 19 bp, Artificial Sequence
  Description of Artificial Sequence: Synthetic primer
tgtcctggtccacctcctg

SEQ ID NO: 20045 - DNA, 21 bp, Artificial Sequence
  Description of Artificial Sequence: Synthetic primer
atccctcgctctaccatccag

SEQ ID NO: 20046 - DNA, 28 bp, Artificial Sequence
  Description of Artificial Sequence: Synthetic primer
cacaaccaatgaacatacttgtattgct

SEQ ID NO: 20047 - DNA, 29 bp, Artificial Sequence
  Description of Artificial Sequence: Synthetic primer
cgtcagtaaaagagagattattgctcgac

SEQ ID NO: 20048 - DNA, 23 bp, Artificial Sequence
  Description of Artificial Sequence: Synthetic primer
ttcacaaggatctcaaagagcca

SEQ ID NO: 20049 - DNA, 19 bp, Artificial Sequence
  Description of Artificial Sequence: Synthetic primer
cagcaaggaggagctctgg

SEQ ID NO: 20050 - DNA, 21 bp, Artificial Sequence
  Description of Artificial Sequence: Synthetic primer
gacacgagccgctttagtttc

SEQ ID NO: 20051 - DNA, 28 bp, Artificial Sequence
  Description of Artificial Sequence: Synthetic primer
tttggcattgatagtacagattacaagc

SEQ ID NO: 20052 - DNA, 21 bp, Artificial Sequence
  Description of Artificial Sequence: Synthetic primer
cgctgaccgttaagtggttgt

SEQ ID NO: 20053 - DNA, 21 bp, Artificial Sequence
  Description of Artificial Sequence: Synthetic primer
cggaacgttgcgattccattc

SEQ ID NO: 20054 - DNA, 22 bp, Artificial Sequence
  Description of Artificial Sequence: Synthetic primer
gaagtttggacccgcaggaata

SEQ ID NO: 20055 - DNA, 27 bp, Artificial Sequence
  Description of Artificial Sequence: Synthetic primer
tgcacaaacttagatccattttaacgc

SEQ ID NO: 20056 - DNA, 25 bp, Artificial Sequence
  Description of Artificial Sequence: Synthetic primer
ggctccttcacatcatcttcagtag

SEQ ID NO: 20057 - DNA, 21 bp, Artificial Sequence
  Description of Artificial Sequence: Synthetic primer
ataccagactcggctagcgaa

SEQ ID NO: 20058 - DNA, 23 bp, Artificial Sequence
  Description of Artificial Sequence: Synthetic primer
tggtgcactcacgagtttatttg

SEQ ID NO: 20059 - DNA, 27 bp, Artificial Sequence
  Description of Artificial Sequence: Synthetic primer
tgcatcatgtggtagtagataggtaga

SEQ ID NO: 20060 - DNA, 24 bp, Artificial Sequence
  Description of Artificial Sequence: Synthetic primer
agatccaaatcatcgacaggttct

SEQ ID NO: 20061 - DNA, 30 bp, Artificial Sequence
  Description of Artificial Sequence: Synthetic primer
tcagtagatttagatatcaaacggtcgtag

SEQ ID NO: 20062 - DNA, 21 bp, Artificial Sequence
  Description of Artificial Sequence: Synthetic primer
agcaactacccatctgctgtg

SEQ ID NO: 20063 - DNA, 24 bp, Artificial Sequence
  Description of Artificial Sequence: Synthetic primer
caaaggaatattgcgttgagcaca

SEQ ID NO: 20064 - DNA, 25 bp, Artificial Sequence
  Description of Artificial Sequence: Synthetic primer
ggtgtttctcataggctctcatgac

SEQ ID NO: 20065 - DNA, 27 bp, Artificial Sequence
  Description of Artificial Sequence: Synthetic primer
ctacaggtagagcacgatacttcaatt

SEQ ID NO: 20066 - DNA, 22 bp, Artificial Sequence
  Description of Artificial Sequence: Synthetic primer
cccatgacaggagctagcattg

SEQ ID NO: 20067 - DNA, 26 bp, Artificial Sequence
  Description of Artificial Sequence: Synthetic primer
ttcaaccatatgaagagaaggtccaa

SEQ ID NO: 20068 - DNA, 28 bp, Artificial Sequence
  Description of Artificial Sequence: Synthetic primer
ggctcctaacaaaattctgtttgctaaa

SEQ ID NO: 20069 - DNA, 28 bp, Artificial Sequence
  Description of Artificial Sequence: Synthetic primer
tctgcatcatatcattcattcatggaca

SEQ ID NO: 20070 - DNA, 28 bp, Artificial Sequence
  Description of Artificial Sequence: Synthetic primer
cgagtcttgtttccagcatacataagat

SEQ ID NO: 20071 - DNA, 22 bp, Artificial Sequence
  Description of Artificial Sequence: Synthetic primer
agcctagatcctgcatcatcat

SEQ ID NO: 20072 - DNA, 21 bp, Artificial Sequence
  Description of Artificial Sequence: Synthetic primer
aaagccccaaaggtccagttc

SEQ ID NO: 20073 - DNA, 21 bp, Artificial Sequence
  Description of Artificial Sequence: Synthetic primer
tgcggcaaggcttgtaaatct

SEQ ID NO: 20074 - DNA, 25 bp, Artificial Sequence
  Description of Artificial Sequence: Synthetic primer
cgttggtgtattcttattgcggaga

SEQ ID NO: 20075 - DNA, 21 bp, Artificial Sequence
  Description of Artificial Sequence: Synthetic primer
gttgtcgatcttcctcgcctt

SEQ ID NO: 20076 - DNA, 28 bp, Artificial Sequence
  Description of Artificial Sequence: Synthetic primer
cccttgacccatataggctaacatttac

SEQ ID NO: 20077 - DNA, 26 bp, Artificial Sequence
  Description of Artificial Sequence: Synthetic primer
gagcacttttattctccaatcccttg

SEQ ID NO: 20078 - DNA, 27 bp, Artificial Sequence
  Description of Artificial Sequence: Synthetic primer
tcttgtgcttttgttgatagtttgtgt

SEQ ID NO: 20079 - DNA, 21 bp, Artificial Sequence
  Description of Artificial Sequence: Synthetic primer
gaatgcctccaaccacatcag

SEQ ID NO: 20080 - DNA, 25 bp, Artificial Sequence
  Description of Artificial Sequence: Synthetic primer
agattgacttcatcaggtgtgactg

SEQ ID NO: 20081 - DNA, 22 bp, Artificial Sequence
  Description of Artificial Sequence: Synthetic primer
gcgcattcatgtcagcgattta

SEQ ID NO: 20082 - DNA, 22 bp, Artificial Sequence
  Description of Artificial Sequence: Synthetic primer
catcagtagtcatcgcctctgg

SEQ ID NO: 20083 - DNA, 25 bp, Artificial Sequence
  Description of Artificial Sequence: Synthetic primer
tttgtataccatgtagcttcctgct

SEQ ID NO: 20084 - DNA, 21 bp, Artificial Sequence
  Description of Artificial Sequence: Synthetic primer
atccagcagcatcaagcagac

SEQ ID NO: 20085 - DNA, 28 bp, Artificial Sequence
  Description of Artificial Sequence: Synthetic primer
tggctttctatacattcaacatcttggt

SEQ ID NO: 20086 - DNA, 28 bp, Artificial Sequence
  Description of Artificial Sequence: Synthetic primer
aggtctagaattgccataagaaacatga

SEQ ID NO: 20087 - DNA, 23 bp, Artificial Sequence
  Description of Artificial Sequence: Synthetic primer
ccattcttccatcagctcaacct

SEQ ID NO: 20088 - DNA, 28 bp, Artificial Sequence
  Description of Artificial Sequence: Synthetic primer
gaggttcatgtatgtaaggacaacagat

SEQ ID NO: 20089 - DNA, 23 bp, Artificial Sequence
  Description of Artificial Sequence: Synthetic primer
tgagatgtctgattccgtgtgac

SEQ ID NO: 20090 - DNA, 21 bp, Artificial Sequence
  Description of Artificial Sequence: Synthetic primer
atgttagcggaccaggaactg

SEQ ID NO: 20091 - DNA, 21 bp, Artificial Sequence
  Description of Artificial Sequence: Synthetic primer
ggtgatacaaggcggcttcta

SEQ ID NO: 20092 - DNA, 26 bp, Artificial Sequence
  Description of Artificial Sequence: Synthetic primer
catacgagccagaactaaagtctgtt

SEQ ID NO: 20093 - DNA, 25 bp, Artificial Sequence
  Description of Artificial Sequence: Synthetic primer
gggcgagctgatttatacagttttc

SEQ ID NO: 20094 - DNA, 25 bp, Artificial Sequence
  Description of Artificial Sequence: Synthetic primer
caactcaagtggatacatgttctgc

SEQ ID NO: 20095 - DNA, 25 bp, Artificial Sequence
  Description of Artificial Sequence: Synthetic primer
agcttctaaactcatgagtgcatgt

SEQ ID NO: 20096 - DNA, 21 bp, Artificial Sequence
  Description of Artificial Sequence: Synthetic primer
ctgcagcgaaatgatcagcaa

SEQ ID NO: 20097 - DNA, 21 bp, Artificial Sequence
  Description of Artificial Sequence: Synthetic primer
ctatactgtgccgccttggtc

SEQ ID NO: 20098 - DNA, 27 bp, Artificial Sequence
  Description of Artificial Sequence: Synthetic primer
aaagtactgttacattggaggactcaa

SEQ ID NO: 20099 - DNA, 29 bp, Artificial Sequence
  Description of Artificial Sequence: Synthetic primer
tttctcagctcaattatatttgctgcact

SEQ ID NO: 20100 - DNA, 25 bp, Artificial Sequence
  Description of Artificial Sequence: Synthetic primer
ccatagcaatcgttcatacaaacca

SEQ ID NO: 20101 - DNA, 22 bp, Artificial Sequence
  Description of Artificial Sequence: Synthetic primer
tctcgtcgtctgccgatgatta

SEQ ID NO: 20102 - DNA, 24 bp, Artificial Sequence
  Description of Artificial Sequence: Synthetic primer
ccttttcattcaccgccttcaatg

SEQ ID NO: 20103 - DNA, 21 bp, Artificial Sequence
  Description of Artificial Sequence: Synthetic primer
caacacgcgcgataatcacaa

SEQ ID NO: 20104 - DNA, 22 bp, Artificial Sequence
  Description of Artificial Sequence: Synthetic primer
gcttgcgactaaagctcacaaa

SEQ ID NO: 20105 - DNA, 22 bp, Artificial Sequence
  Description of Artificial Sequence: Synthetic primer
agatgcagtacaaaccaggtct

SEQ ID NO: 20106 - DNA, 27 bp, Artificial Sequence
  Description of Artificial Sequence: Synthetic primer
acatcataaagtacacacacagacaga

SEQ ID NO: 20107 - DNA, 28 bp, Artificial Sequence
  Description of Artificial Sequence: Synthetic primer
agaaggaacgagagatagataaactcct

SEQ ID NO: 20108 - DNA, 24 bp, Artificial Sequence
  Description of Artificial Sequence: Synthetic primer
aggaatgtattcgttgtcttccca

SEQ ID NO: 20109 - DNA, 21 bp, Artificial Sequence
  Description of Artificial Sequence: Synthetic primer
gctccagttgtccatggctat

SEQ ID NO: 20110 - DNA, 22 bp, Artificial Sequence
  Description of Artificial Sequence: Synthetic primer
ccgcttaccaaagtctgcatct

SEQ ID NO: 20111 - DNA, 24 bp, Artificial Sequence
  Description of Artificial Sequence: Synthetic primer
ctagaagagagcttatgtgacgca

SEQ ID NO: 20112 - DNA, 26 bp, Artificial Sequence
  Description of Artificial Sequence: Synthetic primer
acctttttcaacatttcagcctcatc

SEQ ID NO: 20113 - DNA, 21 bp, Artificial Sequence
  Description of Artificial Sequence: Synthetic primer
gtacacacgctccggatatca

SEQ ID NO: 20114 - DNA, 27 bp, Artificial Sequence
  Description of Artificial Sequence: Synthetic primer
tttttctctctatctgaccatgtcctg

SEQ ID NO: 20115 - DNA, 24 bp, Artificial Sequence
  Description of Artificial Sequence: Synthetic primer
gacgccaaacaaatgtcaattgag

SEQ ID NO: 20116 - DNA, 23 bp, Artificial Sequence
  Description of Artificial Sequence: Synthetic primer
agaagaaaatgcaccacacgttg

SEQ ID NO: 20117 - DNA, 27 bp, Artificial Sequence
  Description of Artificial Sequence: Synthetic primer
atataactgatcgagaacatgctgtga

SEQ ID NO: 20118 - DNA, 28 bp, Artificial Sequence
  Description of Artificial Sequence: Synthetic primer
caaattaaccttttcgtgcaacttacag

SEQ ID NO: 20119 - DNA, 26 bp, Artificial Sequence
  Description of Artificial Sequence: Synthetic primer
gccacaacttaatgagttccatcatc

SEQ ID NO: 20120 - DNA, 22 bp, Artificial Sequence
  Description of Artificial Sequence: Synthetic primer
accaatctaacttgggacggtt

SEQ ID NO: 20121 - DNA, 22 bp, Artificial Sequence
  Description of Artificial Sequence: Synthetic primer
tcctcggttgctttgcataatg

SEQ ID NO: 20122 - DNA, 23 bp, Artificial Sequence
  Description of Artificial Sequence: Synthetic primer
acatttctagtttgccctagcga

SEQ ID NO: 20123 - DNA, 24 bp, Artificial Sequence
  Description of Artificial Sequence: Synthetic primer
ggcattttacggtagtcacacaga

SEQ ID NO: 20124 - DNA, 21 bp, Artificial Sequence
  Description of Artificial Sequence: Synthetic primer
caccagcttaccgatctcctc

SEQ ID NO: 20125 - DNA, 26 bp, Artificial Sequence
  Description of Artificial Sequence: Synthetic primer
aacagaaaaatgaactggccatcaaa

SEQ ID NO: 20126 - DNA, 25 bp, Artificial Sequence
  Description of Artificial Sequence: Synthetic primer
cacagtgtgttgaagtcagtctttg

SEQ ID NO: 20127 - DNA, 28 bp, Artificial Sequence
  Description of Artificial Sequence: Synthetic primer
cactctcgaaattcttgctaagtacttt

SEQ ID NO: 20128 - DNA, 28 bp, Artificial Sequence
  Description of Artificial Sequence: Synthetic primer
cgtccttggatttcttcttcttctttga

SEQ ID NO: 20129 - DNA, 21 bp, Artificial Sequence
  Description of Artificial Sequence: Synthetic primer
aatccgagccagatgataccg

SEQ ID NO: 20130 - DNA, 21 bp, Artificial Sequence
  Description of Artificial Sequence: Synthetic primer
gaaaaacattgcctcgcctgt

SEQ ID NO: 20131 - DNA, 27 bp, Artificial Sequence
  Description of Artificial Sequence: Synthetic primer
agccttgagggaatggaaataagtaaa

SEQ ID NO: 20132 - DNA, 23 bp, Artificial Sequence
  Description of Artificial Sequence: Synthetic primer
ccaaaagctcagaacagaactgg

SEQ ID NO: 20133 - DNA, 19 bp, Artificial Sequence
  Description of Artificial Sequence: Synthetic primer
ccgagatacgccgggtatg

SEQ ID NO: 20134 - DNA, 28 bp, Artificial Sequence
  Description of Artificial Sequence: Synthetic primer
tcagcaagaaatataattcaggccaaga

SEQ ID NO: 20135 - DNA, 19 bp, Artificial Sequence
  Description of Artificial Sequence: Synthetic primer
cctgtgtgccttgatggct

SEQ ID NO: 20136 - DNA, 22 bp, Artificial Sequence
  Description of Artificial Sequence: Synthetic primer
cgagaagtctttgacatcgcaa

SEQ ID NO: 20137 - DNA, 21 bp, Artificial Sequence
  Description of Artificial Sequence: Synthetic primer
cggatgatctggctgaagctg

SEQ ID NO: 20138 - DNA, 24 bp, Artificial Sequence
  Description of Artificial Sequence: Synthetic primer
tggtagatcagtgtctccagaagt

SEQ ID NO: 20139 - DNA, 25 bp, Artificial Sequence
  Description of Artificial Sequence: Synthetic primer
tcgtaatgctgacgtaaatttcagg

SEQ ID NO: 20140 - DNA, 21 bp, Artificial Sequence
  Description of Artificial Sequence: Synthetic primer
gctcaaactcaggcagtacga

SEQ ID NO: 20141 - DNA, 23 bp, Artificial Sequence
  Description of Artificial Sequence: Synthetic primer
caaaccaagttatcaagcgcaca

SEQ ID NO: 20142 - DNA, 26 bp, Artificial Sequence
  Description of Artificial Sequence: Synthetic primer
aaagttatcacttccaaccaaacagg

SEQ ID NO: 20143 - DNA, 27 bp, Artificial Sequence
  Description of Artificial Sequence: Synthetic primer
agagcctacttatgttctgaagaacaa

SEQ ID NO: 20144 - DNA, 22 bp, Artificial Sequence
  Description of Artificial Sequence: Synthetic primer
gtaacacgaagggtgccaaaac

SEQ ID NO: 20145 - DNA, 28 bp, Artificial Sequence
  Description of Artificial Sequence: Synthetic primer
gcgaaaacatttcgatgtaaccaaaaat

SEQ ID NO: 20146 - DNA, 22 bp, Artificial Sequence
  Description of Artificial Sequence: Synthetic primer
tctctagactcgcagtgctttg

SEQ ID NO: 20147 - DNA, 21 bp, Artificial Sequence
  Description of Artificial Sequence: Synthetic primer
atctcccaataagcgctgacc

SEQ ID NO: 20148 - DNA, 21 bp, Artificial Sequence
  Description of Artificial Sequence: Synthetic primer
gctttcacaagcaccactgtt

SEQ ID NO: 20149 - DNA, 22 bp, Artificial Sequence
  Description of Artificial Sequence: Synthetic primer
ggaataatgccgtgatgccttt

SEQ ID NO: 20150 - DNA, 21 bp, Artificial Sequence
  Description of Artificial Sequence: Synthetic primer
tcgctctcatcgtcgtcattt

SEQ ID NO: 20151 - DNA, 23 bp, Artificial Sequence
  Description of Artificial Sequence: Synthetic primer
acgagcatgcttgcattaatctc

SEQ ID NO: 20152 - DNA, 25 bp, Artificial Sequence
  Description of Artificial Sequence: Synthetic primer
catagaggcctttctgtctagcttt

SEQ ID NO: 20153 - DNA, 21 bp, Artificial Sequence
  Description of Artificial Sequence: Synthetic primer
ggattggaaggcgagaacctt

SEQ ID NO: 20154 - DNA, 19 bp, Artificial Sequence
  Description of Artificial Sequence: Synthetic primer
ccatgtcggtcacctcctc

SEQ ID NO: 20155 - DNA, 21 bp, Artificial Sequence
  Description of Artificial Sequence: Synthetic primer
atccgagaaacccccattgac

SEQ ID NO: 20156 - DNA, 21 bp, Artificial Sequence
  Description of Artificial Sequence: Synthetic primer
gatggcaagggatgagtttcg

SEQ ID NO: 20157 - DNA, 26 bp, Artificial Sequence
  Description of Artificial Sequence: Synthetic primer
tgatcaactaagtggaaatcggagat

SEQ ID NO: 20158 - DNA, 23 bp, Artificial Sequence
  Description of Artificial Sequence: Synthetic primer
gctgacaccaaatttcacaccaa

SEQ ID NO: 20159 - DNA, 27 bp, Artificial Sequence
  Description of Artificial Sequence: Synthetic primer
tgcccttacttttcctatattgtgact

SEQ ID NO: 20160 - DNA, 24 bp, Artificial Sequence
  Description of Artificial Sequence: Synthetic primer
cccatgtgatgcataagatcctgt

SEQ ID NO: 20161 - DNA, 21 bp, Artificial Sequence
  Description of Artificial Sequence: Synthetic primer
tttgtggctggaggctaagaa

SEQ ID NO: 20162 - DNA, 23 bp, Artificial Sequence
  Description of Artificial Sequence: Synthetic primer
acccagattgctaatgtgcttca

SEQ ID NO: 20163 - DNA, 28 bp, Artificial Sequence
  Description of Artificial Sequence: Synthetic primer
agtgtcatctgcgtgtgttattattaga

SEQ ID NO: 20164 - DNA, 26 bp, Artificial Sequence
  Description of Artificial Sequence: Synthetic primer
tccttcaagcgtatcctaaagaaact

SEQ ID NO: 20165 - DNA, 21 bp, Artificial Sequence
  Description of Artificial Sequence: Synthetic primer
gtccacagcatcggcaagtat

SEQ ID NO: 20166 - DNA, 22 bp, Artificial Sequence
  Description of Artificial Sequence: Synthetic primer
accagacttaggtgggaggtac

SEQ ID NO: 20167 - DNA, 24 bp, Artificial Sequence
  Description of Artificial Sequence: Synthetic primer
ggcttgcacatccacaaattaaca

SEQ ID NO: 20168 - DNA, 28 bp, Artificial Sequence
  Description of Artificial Sequence: Synthetic primer
catcagagaaactatagcacctctttcc

SEQ ID NO: 20169 - DNA, 26 bp, Artificial Sequence
  Description of Artificial Sequence: Synthetic primer
aaagaaggatatgacgtcgttgtaga

SEQ ID NO: 20170 - DNA, 23 bp, Artificial Sequence
  Description of Artificial Sequence: Synthetic primer
ttgagagccaacacctcatacaa

SEQ ID NO: 20171 - DNA, 22 bp, Artificial Sequence
  Description of Artificial Sequence: Synthetic primer
tctaagcctgtaaagggtcacg

SEQ ID NO: 20172 - DNA, 25 bp, Artificial Sequence
  Description of Artificial Sequence: Synthetic primer
tgcatgctaactagcccttgtatag

SEQ ID NO: 20173 - DNA, 24 bp, Artificial Sequence
  Description of Artificial Sequence: Synthetic primer
gctgcaatgttgcagatagaatga

SEQ ID NO: 20174 - DNA, 22 bp, Artificial Sequence
  Description of Artificial Sequence: Synthetic primer
ccagatggcaaagactgacctg

SEQ ID NO: 20175 - DNA, 21 bp, Artificial Sequence
  Description of Artificial Sequence: Synthetic primer
atttcgcttagggttctgcca

SEQ ID NO: 20176 - DNA, 27 bp, Artificial Sequence
  Description of Artificial Sequence: Synthetic primer
tgaatggcaagttaatggtctcatttc

SEQ ID NO: 20177 - DNA, 21 bp, Artificial Sequence
  Description of Artificial Sequence: Synthetic primer
cgtacttggtggccttctcag

SEQ ID NO: 20178 - DNA, 22 bp, Artificial Sequence
  Description of Artificial Sequence: Synthetic primer
ttaccacggatcacaaatgcga

SEQ ID NO: 20179 - DNA, 25 bp, Artificial Sequence
  Description of Artificial Sequence: Synthetic primer
tcattacaaacatatgcagctgcaa

SEQ ID NO: 20180 - DNA, 22 bp, Artificial Sequence
  Description of Artificial Sequence: Synthetic primer
actgttgctgatggatcgtctt

SEQ ID NO: 20181 - DNA, 24 bp, Artificial Sequence
  Description of Artificial Sequence: Synthetic primer
gttttgagctggatgctaagactc

SEQ ID NO: 20182 - DNA, 21 bp, Artificial Sequence
  Description of Artificial Sequence: Synthetic primer
ttatgtgaaaggcccgcaaga

SEQ ID NO: 20183 - DNA, 22 bp, Artificial Sequence
  Description of Artificial Sequence: Synthetic primer
ctctcaggtgctacccaagaaa

SEQ ID NO: 20184 - DNA, 26 bp, Artificial Sequence
  Description of Artificial Sequence: Synthetic primer
agagtcagcctttacataaagcgaaa

SEQ ID NO: 20185 - DNA, 21 bp, Artificial Sequence
  Description of Artificial Sequence: Synthetic primer
atcctctcaggacagctttgc

SEQ ID NO: 20186 - DNA, 27 bp, Artificial Sequence
  Description of Artificial Sequence: Synthetic primer
gcaaatcatcaactgaagaaacatgtg

SEQ ID NO: 20187 - DNA, 27 bp, Artificial Sequence
  Description of Artificial Sequence: Synthetic primer
gcagagttatctctctaccaagacgta

SEQ ID NO: 20188 - DNA, 25 bp, Artificial Sequence
  Description of Artificial Sequence: Synthetic primer
ggctattatgtatgccacatggttc

SEQ ID NO: 20189 - DNA, 23 bp, Artificial Sequence
  Description of Artificial Sequence: Synthetic primer
ggttttgcatcacaggaaacaca

SEQ ID NO: 20190 - DNA, 21 bp, Artificial Sequence
  Description of Artificial Sequence: Synthetic primer
gttctccgtcagctagcatca

SEQ ID NO: 20191 - DNA, 23 bp, Artificial Sequence
  Description of Artificial Sequence: Synthetic primer
actaggtaagcaaacaacagcca

SEQ ID NO: 20192 - DNA, 21 bp, Artificial Sequence
  Description of Artificial Sequence: Synthetic primer
ctcccttgcaaacaacaccct

SEQ ID NO: 20193 - DNA, 25 bp, Artificial Sequence
  Description of Artificial Sequence: Synthetic primer
cccacaccgctagtttttgaatatc

SEQ ID NO: 20194 - DNA, 27 bp, Artificial Sequence
  Description of Artificial Sequence: Synthetic primer
ccaaagcctgtctatctgtctatgatc

SEQ ID NO: 20195 - DNA, 23 bp, Artificial Sequence
  Description of Artificial Sequence: Synthetic primer
tataaacagggctgtacggagca

SEQ ID NO: 20196 - DNA, 26 bp, Artificial Sequence
  Description of Artificial Sequence: Synthetic primer
gctccggtatgtatgtaagacctttc

SEQ ID NO: 20197 - DNA, 25 bp, Artificial Sequence
  Description of Artificial Sequence: Synthetic primer
ggtaacagaaaatccaggtcccatt

SEQ ID NO: 20198 - DNA, 26 bp, Artificial Sequence
  Description of Artificial Sequence: Synthetic primer
cataacagcacagcaaggttaaagat

SEQ ID NO: 20199 - DNA, 24 bp, Artificial Sequence
  Description of Artificial Sequence: Synthetic primer
tctccacatggatatgtctgaacc

SEQ ID NO: 20200 - DNA, 21 bp, Artificial Sequence
  Description of Artificial Sequence: Synthetic primer
aaccacccaatgaagccactt

SEQ ID NO: 20201 - DNA, 26 bp, Artificial Sequence
  Description of Artificial Sequence: Synthetic primer
acatcatcaggaagatgaatccatgt

SEQ ID NO: 20202 - DNA, 21 bp, Artificial Sequence
  Description of Artificial Sequence: Synthetic primer
cgccaaatctaaggagccaca

SEQ ID NO: 20203 - DNA, 27 bp, Artificial Sequence
  Description of Artificial Sequence: Synthetic primer
gcttcatttgctttcgaagaataaacg

SEQ ID NO: 20204 - DNA, 21 bp, Artificial Sequence
  Description of Artificial Sequence: Synthetic primer
cctggttccaagcatcgtcta

SEQ ID NO: 20205 - DNA, 21 bp, Artificial Sequence
  Description of Artificial Sequence: Synthetic primer
gagctccttctcctcctgaga

SEQ ID NO: 20206 - DNA, 21 bp, Artificial Sequence
  Description of Artificial Sequence: Synthetic primer
tgttcaggatgccctgtatgg

SEQ ID NO: 20207 - DNA, 21 bp, Artificial Sequence
  Description of Artificial Sequence: Synthetic primer
ctctgccactctccctactgt

SEQ ID NO: 20208 - DNA, 21 bp, Artificial Sequence
  Description of Artificial Sequence: Synthetic primer
gatgctgaaggttaccggcat

SEQ ID NO: 20209 - DNA, 21 bp, Artificial Sequence
  Description of Artificial Sequence: Synthetic primer
cggttttctcactgctcgttg

SEQ ID NO: 20210 - DNA, 19 bp, Artificial Sequence
  Description of Artificial Sequence: Synthetic primer
gacgtggtctaccggagca

SEQ ID NO: 20211 - DNA, 23 bp, Artificial Sequence
  Description of Artificial Sequence: Synthetic primer
ggcagcagatgatcaaatccatg

SEQ ID NO: 20212 - DNA, 21 bp, Artificial Sequence
  Description of Artificial Sequence: Synthetic primer
ctgggcgttatgttcatggga

SEQ ID NO: 20213 - DNA, 27 bp, Artificial Sequence
  Description of Artificial Sequence: Synthetic primer
gaacctcagtacgtttacttctttcca

SEQ ID NO: 20214 - DNA, 27 bp, Artificial Sequence
  Description of Artificial Sequence: Synthetic primer
cgaaaactaactgggcttttgatttcc

SEQ ID NO: 20215 - DNA, 26 bp, Artificial Sequence
  Description of Artificial Sequence: Synthetic primer
ttcttgcagtgataaacgaagttcac

SEQ ID NO: 20216 - DNA, 21 bp, Artificial Sequence
  Description of Artificial Sequence: Synthetic primer
cgtcatgtctagagggaggga

SEQ ID NO: 20217 - DNA, 27 bp, Artificial Sequence
  Description of Artificial Sequence: Synthetic primer
tcttgatcaagattagcgtctctgatg

SEQ ID NO: 20218 - DNA, 23 bp, Artificial Sequence
  Description of Artificial Sequence: Synthetic primer
acagatgacaccaggattccaaa

SEQ ID NO: 20219 - DNA, 23 bp, Artificial Sequence
  Description of Artificial Sequence: Synthetic primer
gctcattgcacgactcaaagaaa

SEQ ID NO: 20220 - DNA, 23 bp, Artificial Sequence
  Description of Artificial Sequence: Synthetic primer
ggtcaatccttgagcttccatca

SEQ ID NO: 20221 - DNA, 25 bp, Artificial Sequence
  Description of Artificial Sequence: Synthetic primer
agacaataccatgcatgcaattagc

SEQ ID NO: 20222 - DNA, 24 bp, Artificial Sequence
  Description of Artificial Sequence: Synthetic primer
ggcgtttcttgactattccagcta

SEQ ID NO: 20223 - DNA, 21 bp, Artificial Sequence
  Description of Artificial Sequence: Synthetic primer
gtagatctgcgggtgtagacg

SEQ ID NO: 20224 - DNA, 21 bp, Artificial Sequence
  Description of Artificial Sequence: Synthetic primer
atgcgttgtctcagcattgac

SEQ ID NO: 20225 - DNA, 21 bp, Artificial Sequence
  Description of Artificial Sequence: Synthetic primer
ctttcttcccgctgtttaggc

SEQ ID NO: 20226 - DNA, 25 bp, Artificial Sequence
  Description of Artificial Sequence: Synthetic primer
aggtgttagtgccaatgagaaatct

SEQ ID NO: 20227 - DNA, 21 bp, Artificial Sequence
  Description of Artificial Sequence: Synthetic primer
tacaccactcagagtcaccga

SEQ ID NO: 20228 - DNA, 27 bp, Artificial Sequence
  Description of Artificial Sequence: Synthetic primer
acacctaagtaaatcagctcatgatgg

SEQ ID NO: 20229 - DNA, 21 bp, Artificial Sequence
  Description of Artificial Sequence: Synthetic primer
gaacaacctcaggcctgatct

SEQ ID NO: 20230 - DNA, 23 bp, Artificial Sequence
  Description of Artificial Sequence: Synthetic primer
accatatacttgctgcaactgct

SEQ ID NO: 20231 - DNA, 21 bp, Artificial Sequence
  Description of Artificial Sequence: Synthetic primer
gcttgattccagcaccaacaa

SEQ ID NO: 20232 - DNA, 28 bp, Artificial Sequence
  Description of Artificial Sequence: Synthetic primer
tgacatctttgtacagcaagtacctaga

SEQ ID NO: 20233 - DNA, 21 bp, Artificial Sequence
  Description of Artificial Sequence: Synthetic primer
gcaatgttcatagcagcgact

SEQ ID NO: 20234 - DNA, 22 bp, Artificial Sequence
  Description of Artificial Sequence: Synthetic primer
cgttcaacagcttgtggaactc

SEQ ID NO: 20235 - DNA, 21 bp, Artificial Sequence
  Description of Artificial Sequence: Synthetic primer
agaggagaaaatccgccttgc

SEQ ID NO: 20236 - DNA, 23 bp, Artificial Sequence
  Description of Artificial Sequence: Synthetic primer
tccctgagttagctccaatgaga

SEQ ID NO: 20237 - DNA, 24 bp, Artificial Sequence
  Description of Artificial Sequence: Synthetic primer
tgctaactccatctgacctactcc

SEQ ID NO: 20238 - DNA, 21 bp, Artificial Sequence
  Description of Artificial Sequence: Synthetic primer
gcggaggcaaatagtctacga

SEQ ID NO: 20239 - DNA, 22 bp, Artificial Sequence
  Description of Artificial Sequence: Synthetic primer
tgcttgagctctcctcaaagtg

SEQ ID NO: 20240 - DNA, 21 bp, Artificial Sequence
  Description of Artificial Sequence: Synthetic primer
gaggtgagcaagtacgtcgtc

SEQ ID NO: 20241 - DNA, 23 bp, Artificial Sequence
  Description of Artificial Sequence: Synthetic primer
aaaggacttggattgaccatcct

SEQ ID NO: 20242 - DNA, 28 bp, Artificial Sequence
  Description of Artificial Sequence: Synthetic primer
aacttcacattcctaattggttcatcac

SEQ ID NO: 20243 - DNA, 21 bp, Artificial Sequence
  Description of Artificial Sequence: Synthetic primer
cttagcagatgccaagaccga

SEQ ID NO: 20244 - DNA, 23 bp, Artificial Sequence
  Description of Artificial Sequence: Synthetic primer
ccgccaaggatcctagatatctg

SEQ ID NO: 20245 - DNA, 27 bp, Artificial Sequence
  Description of Artificial Sequence: Synthetic primer
agatggtttgcatgtacaatctgattc

SEQ ID NO: 20246 - DNA, 26 bp, Artificial Sequence
  Description of Artificial Sequence: Synthetic primer
tctgccacaagtgggatgtaaataaa

SEQ ID NO: 20247 - DNA, 27 bp, Artificial Sequence
  Description of Artificial Sequence: Synthetic primer
tgcttagattacacaaccgaagaaaac

SEQ ID NO: 20248 - DNA, 22 bp, Artificial Sequence
  Description of Artificial Sequence: Synthetic primer
actgcatttctcagttctggca

SEQ ID NO: 20249 - DNA, 21 bp, Artificial Sequence
  Description of Artificial Sequence: Synthetic primer
ctatatgaccaggccgacgtg

SEQ ID NO: 20250 - DNA, 25 bp, Artificial Sequence
  Description of Artificial Sequence: Synthetic primer
gctatctatccttcgtcctgattcg

SEQ ID NO: 20251 - DNA, 23 bp, Artificial Sequence
  Description of Artificial Sequence: Synthetic primer
gctgctctttccctgtaaaagac

SEQ ID NO: 20252 - DNA, 25 bp, Artificial Sequence
  Description of Artificial Sequence: Synthetic primer
gaacagcttaggttgcttgttgatt

SEQ ID NO: 20253 - DNA, 22 bp, Artificial Sequence
  Description of Artificial Sequence: Synthetic primer
ccaggcccatgtatatttccgt

SEQ ID NO: 20254 - DNA, 28 bp, Artificial Sequence
  Description of Artificial Sequence: Synthetic primer
agattacaggtcctaaatgaagcacaaa

SEQ ID NO: 20255 - DNA, 21 bp, Artificial Sequence
  Description of Artificial Sequence: Synthetic primer
cagtgcagggatgctgcatat

SEQ ID NO: 20256 - DNA, 21 bp, Artificial Sequence
  Description of Artificial Sequence: Synthetic primer
gtgaagcgaacagtgcagaag

SEQ ID NO: 20257 - DNA, 28 bp, Artificial Sequence
  Description of Artificial Sequence: Synthetic primer
cttcaagacaatcaggtggtgtattaga

SEQ ID NO: 20258 - DNA, 27 bp, Artificial Sequence
  Description of Artificial Sequence: Synthetic primer
ggtccactcatttctaaccagaatacc

SEQ ID NO: 20259 - DNA, 28 bp, Artificial Sequence
  Description of Artificial Sequence: Synthetic primer
cgatttttccctgctcttctttgatttt

SEQ ID NO: 20260 - DNA, 22 bp, Artificial Sequence
  Description of Artificial Sequence: Synthetic primer
gctgggacactaacatgcagta

SEQ ID NO: 20261 - DNA, 26 bp, Artificial Sequence
  Description of Artificial Sequence: Synthetic primer
tcttcagatcagtgtgaaaagtagca

SEQ ID NO: 20262 - DNA, 27 bp, Artificial Sequence
  Description of Artificial Sequence: Synthetic primer
ggagagcaacagcttcagaatttaaaa

SEQ ID NO: 20263 - DNA, 21 bp, Artificial Sequence
  Description of Artificial Sequence: Synthetic primer
cctgttacagggttggttccg

SEQ ID NO: 20264 - DNA, 24 bp, Artificial Sequence
  Description of Artificial Sequence: Synthetic primer
tgagcgttggagatccacaataaa

SEQ ID NO: 20265 - DNA, 24 bp, Artificial Sequence
  Description of Artificial Sequence: Synthetic primer
caaatcgttcttcgcgaggaattt

SEQ ID NO: 20266 - DNA, 23 bp, Artificial Sequence
  Description of Artificial Sequence: Synthetic primer
tggagtctaggatgagaagtcca

SEQ ID NO: 20267 - DNA, 21 bp, Artificial Sequence
  Description of Artificial Sequence: Synthetic primer
gatgatcaaaggcctgcagtg

SEQ ID NO: 20268 - DNA, 21 bp, Artificial Sequence
  Description of Artificial Sequence: Synthetic primer
cttggctgctctctcgtcttc

SEQ ID NO: 20269 - DNA, 27 bp, Artificial Sequence
  Description of Artificial Sequence: Synthetic primer
ctactacatgtatctcgagtcaagtcc

SEQ ID NO: 20270 - DNA, 22 bp, Artificial Sequence
  Description of Artificial Sequence: Synthetic primer
ccacaataacatcagccatgcc

SEQ ID NO: 20271 - DNA, 22 bp, Artificial Sequence
  Description of Artificial Sequence: Synthetic primer
ccctttttcgcacctacagagt

SEQ ID NO: 20272 - DNA, 19 bp, Artificial Sequence
  Description of Artificial Sequence: Synthetic primer
ccgctatgccgaagaggtc

SEQ ID NO: 20273 - DNA, 21 bp, Artificial Sequence
  Description of Artificial Sequence: Synthetic primer
gcttaggatctgctcgcatga

SEQ ID NO: 20274 - DNA, 26 bp, Artificial Sequence
  Description of Artificial Sequence: Synthetic primer
catctactttctcagctttgcacttc

SEQ ID NO: 20275 - DNA, 21 bp, Artificial Sequence
  Description of Artificial Sequence: Synthetic primer
cgtgtcgacttgggagacttc

SEQ ID NO: 20276 - DNA, 21 bp, Artificial Sequence
  Description of Artificial Sequence: Synthetic primer
tgtccagtctcaacgcatcac

SEQ ID NO: 20277 - DNA, 28 bp, Artificial Sequence
  Description of Artificial Sequence: Synthetic primer
tgttttgtgcaaatcaatatcaagacca

SEQ ID NO: 20278 - DNA, 27 bp, Artificial Sequence
  Description of Artificial Sequence: Synthetic primer
ttttgataaccatcggtagattcacct

SEQ ID NO: 20279 - DNA, 27 bp, Artificial Sequence
  Description of Artificial Sequence: Synthetic primer
tgcaaaatttatcaaccacagctgtac

SEQ ID NO: 20280 - DNA, 21 bp, Artificial Sequence
  Description of Artificial Sequence: Synthetic primer
aatccggtactccgggtagac

SEQ ID NO: 20281 - DNA, 26 bp, Artificial Sequence
  Description of Artificial Sequence: Synthetic primer
tgttgatattttgactgatcctggca

SEQ ID NO: 20282 - DNA, 21 bp, Artificial Sequence
  Description of Artificial Sequence: Synthetic primer
ccgagaaacaaatcgcactgt

SEQ ID NO: 20283 - DNA, 19 bp, Artificial Sequence
  Description of Artificial Sequence: Synthetic primer
cccttccactgcctctacc

SEQ ID NO: 20284 - DNA, 23 bp, Artificial Sequence
  Description of Artificial Sequence: Synthetic primer
gacagctgcgattttagggatct

SEQ ID NO: 20285 - DNA, 25 bp, Artificial Sequence
  Description of Artificial Sequence: Synthetic primer
ccaattgggatacacttccctagtg

SEQ ID NO: 20286 - DNA, 22 bp, Artificial Sequence
  Description of Artificial Sequence: Synthetic primer
tgagcgctccttcaattcactt

SEQ ID NO: 20287 - DNA, 21 bp, Artificial Sequence
  Description of Artificial Sequence: Synthetic primer
tcccagtgtgtcatgaactcg

SEQ ID NO: 20288 - DNA, 21 bp, Artificial Sequence
  Description of Artificial Sequence: Synthetic primer
gcccggcacatctgatatgta

SEQ ID NO: 20289 - DNA, 22 bp, Artificial Sequence
  Description of Artificial Sequence: Synthetic primer
caggttgttcttggtgattggg

SEQ ID NO: 20290 - DNA, 23 bp, Artificial Sequence
  Description of Artificial Sequence: Synthetic primer
ggcgtcagaaaagggtagaaaca

SEQ ID NO: 20291 - DNA, 21 bp, Artificial Sequence
  Description of Artificial Sequence: Synthetic primer
ggaaccctaggatccttcgtc

SEQ ID NO: 20292 - DNA, 23 bp, Artificial Sequence
  Description of Artificial Sequence: Synthetic primer
agtcgtggccaactacatattcg

SEQ ID NO: 20293 - DNA, 28 bp, Artificial Sequence
  Description of Artificial Sequence: Synthetic primer
ggttgattgcctagtttcataattcagg

SEQ ID NO: 20294 - DNA, 22 bp, Artificial Sequence
  Description of Artificial Sequence: Synthetic primer
atcacccttctaatgacgcctt

SEQ ID NO: 20295 - DNA, 21 bp, Artificial Sequence
  Description of Artificial Sequence: Synthetic primer
aaggctagcaagcaggatgtg

SEQ ID NO: 20296 - DNA, 26 bp, Artificial Sequence
  Description of Artificial Sequence: Synthetic primer
gtagtagtcctcatcagcacaatcaa

SEQ ID NO: 20297 - DNA, 28 bp, Artificial Sequence
  Description of Artificial Sequence: Synthetic primer
agttaactaagtaaaaccacagagcaca

SEQ ID NO: 20298 - DNA, 25 bp, Artificial Sequence
  Description of Artificial Sequence: Synthetic primer
gcattcatgcagcatctaatcttgt

SEQ ID NO: 20299 - DNA, 26 bp, Artificial Sequence
  Description of Artificial Sequence: Synthetic primer
ctttacaatgacagtagttggttgcc

SEQ ID NO: 20300 - DNA, 25 bp, Artificial Sequence
  Description of Artificial Sequence: Synthetic primer
gggcaagctcgtttagatctaagaa

SEQ ID NO: 20301 - DNA, 24 bp, Artificial Sequence
  Description of Artificial Sequence: Synthetic primer
gggtatgtgctgatatctcttgcg

SEQ ID NO: 20302 - DNA, 24 bp, Artificial Sequence
  Description of Artificial Sequence: Synthetic primer
gcttcacttcttcctcttcttcgg

SEQ ID NO: 20303 - DNA, 27 bp, Artificial Sequence
  Description of Artificial Sequence: Synthetic primer
agatcaatgtatgccagaatgattggt

SEQ ID NO: 20304 - DNA, 25 bp, Artificial Sequence
  Description of Artificial Sequence: Synthetic primer
ggtgtcgatttcaaaatacggactg

SEQ ID NO: 20305 - DNA, 21 bp, Artificial Sequence
  Description of Artificial Sequence: Synthetic primer
aggcatgtttcccttggaagc

SEQ ID NO: 20306 - DNA, 21 bp, Artificial Sequence
  Description of Artificial Sequence: Synthetic primer
aatcctactggtgtggcatcg

SEQ ID NO: 20307 - DNA, 21 bp, Artificial Sequence
  Description of Artificial Sequence: Synthetic primer
gaggtccttgtgacggtcaat

SEQ ID NO: 20308 - DNA, 21 bp, Artificial Sequence
  Description of Artificial Sequence: Synthetic primer
cccattggccatgttcctcat

SEQ ID NO: 20309 - DNA, 28 bp, Artificial Sequence
  Description of Artificial Sequence: Synthetic primer
ggagaaaaactaaataggtgctactggt

SEQ ID NO: 20310 - DNA, 23 bp, Artificial Sequence
  Description of Artificial Sequence: Synthetic primer
agacaccagaaaccgattgttca

SEQ ID NO: 20311 - DNA, 26 bp, Artificial Sequence
  Description of Artificial Sequence: Synthetic primer
tgaaaaattgggctgtttccatgttt

SEQ ID NO: 20312 - DNA, 21 bp, Artificial Sequence
  Description of Artificial Sequence: Synthetic primer
tttgagggcttctaccgcaac

SEQ ID NO: 20313 - DNA, 21 bp, Artificial Sequence
  Description of Artificial Sequence: Synthetic primer
tgaggagcaggaacctctttc

SEQ ID NO: 20314 - DNA, 21 bp, Artificial Sequence
  Description of Artificial Sequence: Synthetic primer
caatcgacaaacggtggcaag

SEQ ID NO: 20315 - DNA, 21 bp, Artificial Sequence
  Description of Artificial Sequence: Synthetic primer
gatggtttgcactgctactcc

SEQ ID NO: 20316 - DNA, 21 bp, Artificial Sequence
  Description of Artificial Sequence: Synthetic primer
tgaagcaaggatgcagtaccg

SEQ ID NO: 20317 - DNA, 28 bp, Artificial Sequence
  Description of Artificial Sequence: Synthetic primer
cacatcgttacaatgttcagaaacaaca

SEQ ID NO: 20318 - DNA, 24 bp, Artificial Sequence
  Description of Artificial Sequence: Synthetic primer
tcctcatttatccgcggataccta

SEQ ID NO: 20319 - DNA, 24 bp, Artificial Sequence
  Description of Artificial Sequence: Synthetic primer
cctgattgtgacaatgtggtggat

SEQ ID NO: 20320 - DNA, 24 bp, Artificial Sequence
  Description of Artificial Sequence: Synthetic primer
agttagccacctgtaacacaatca

SEQ ID NO: 20321 - DNA, 22 bp, Artificial Sequence
  Description of Artificial Sequence: Synthetic primer
cttccttcttcatgcgattccg

SEQ ID NO: 20322 - DNA, 22 bp, Artificial Sequence
  Description of Artificial Sequence: Synthetic primer
acatgaggaaatgcaacacacc

SEQ ID NO: 20323 - DNA, 21 bp, Artificial Sequence
  Description of Artificial Sequence: Synthetic primer
taaacattgcagcaggccctt

SEQ ID NO: 20324 - DNA, 23 bp, Artificial Sequence
  Description of Artificial Sequence: Synthetic primer
agtaaatacagctgccctgatgg

SEQ ID NO: 20325 - DNA, 19 bp, Artificial Sequence
  Description of Artificial Sequence: Synthetic primer
gtcggtctcgtccccctta

SEQ ID NO: 20326 - DNA, 28 bp, Artificial Sequence
  Description of Artificial Sequence: Synthetic primer
attctgaatcatatgccatacacatcgc

SEQ ID NO: 20327 - DNA, 28 bp, Artificial Sequence
  Description of Artificial Sequence: Synthetic primer
cctttcattcttacctgatagactttgc

SEQ ID NO: 20328 - DNA, 22 bp, Artificial Sequence
  Description of Artificial Sequence: Synthetic primer
tgccttctgagttgcctctttc

SEQ ID NO: 20329 - DNA, 23 bp, Artificial Sequence
  Description of Artificial Sequence: Synthetic primer
ttgcatttggcctttacatcctc

SEQ ID NO: 20330 - DNA, 22 bp, Artificial Sequence
  Description of Artificial Sequence: Synthetic primer
ggttcaagtgaaaagcccaggt

SEQ ID NO: 20331 - DNA, 24 bp, Artificial Sequence
  Description of Artificial Sequence: Synthetic primer
caagctttacgaacttttctgggt

SEQ ID NO: 20332 - DNA, 21 bp, Artificial Sequence
  Description of Artificial Sequence: Synthetic primer
ttggcgaattgtgacaacgag

SEQ ID NO: 20333 - DNA, 24 bp, Artificial Sequence
  Description of Artificial Sequence: Synthetic primer
tgagaaaactgacccagaatcagg

SEQ ID NO: 20334 - DNA, 18 bp, Artificial Sequence
  Description of Artificial Sequence: Synthetic primer
ctcaggcgcaacaagctg

SEQ ID NO: 20335 - DNA, 27 bp, Artificial Sequence
  Description of Artificial Sequence: Synthetic primer
tgagagattttatgacccaatgtctgg

SEQ ID NO: 20336 - DNA, 21 bp, Artificial Sequence
  Description of Artificial Sequence: Synthetic primer
ctcttgagactccccgctgta

SEQ ID NO: 20337 - DNA, 21 bp, Artificial Sequence
  Description of Artificial Sequence: Synthetic primer
gcagaagccctaccggtaatc

SEQ ID NO: 20338 - DNA, 22 bp, Artificial Sequence
  Description of Artificial Sequence: Synthetic primer
gctgcttgctggttatgctcta

SEQ ID NO: 20339 - DNA, 22 bp, Artificial Sequence
  Description of Artificial Sequence: Synthetic primer
agaccaagaacaagtgctacgg

SEQ ID NO: 20340 - DNA, 27 bp, Artificial Sequence
  Description of Artificial Sequence: Synthetic primer
ccaactgtgtgcttgtctgaaattatg

SEQ ID NO: 20341 - DNA, 28 bp, Artificial Sequence
  Description of Artificial Sequence: Synthetic primer
acagaatctacatctctgaatgaacacg

SEQ ID NO: 20342 - DNA, 21 bp, Artificial Sequence
  Description of Artificial Sequence: Synthetic primer
cgcgtcaacacccttcttttt

SEQ ID NO: 20343 - DNA, 25 bp, Artificial Sequence
  Description of Artificial Sequence: Synthetic primer
cgggactgaagcagatttaatctga

SEQ ID NO: 20344 - DNA, 23 bp, Artificial Sequence
  Description of Artificial Sequence: Synthetic primer
caactggaaaccaaccaagagtg

SEQ ID NO: 20345 - DNA, 28 bp, Artificial Sequence
  Description of Artificial Sequence: Synthetic primer
ggattctgcttccaaagttatggaaatg

SEQ ID NO: 20346 - DNA, 26 bp, Artificial Sequence
  Description of Artificial Sequence: Synthetic primer
actaggattttcctgcagtgcattta

SEQ ID NO: 20347 - DNA, 21 bp, Artificial Sequence
  Description of Artificial Sequence: Synthetic primer
ttctgttgggtggctggattg

SEQ ID NO: 20348 - DNA, 21 bp, Artificial Sequence
  Description of Artificial Sequence: Synthetic primer
gttcccgtcgatccatccatc

SEQ ID NO: 20349 - DNA, 21 bp, Artificial Sequence
  Description of Artificial Sequence: Synthetic primer
cgatctgacagcagccttgta

SEQ ID NO: 20350 - DNA, 21 bp, Artificial Sequence
  Description of Artificial Sequence: Synthetic primer
cctggtaggcttcagaaccaa

SEQ ID NO: 20351 - DNA, 24 bp, Artificial Sequence
  Description of Artificial Sequence: Synthetic primer
acgatgagatagattcctcggaga

SEQ ID NO: 20352 - DNA, 26 bp, Artificial Sequence
  Description of Artificial Sequence: Synthetic primer
acacaggagaaacatttgaagcaatc

SEQ ID NO: 20353 - DNA, 21 bp, Artificial Sequence
  Description of Artificial Sequence: Synthetic primer
gttcagtttcccctgttcacg

SEQ ID NO: 20354 - DNA, 21 bp, Artificial Sequence
  Description of Artificial Sequence: Synthetic primer
gtacctccacacagctcaact

SEQ ID NO: 20355 - DNA, 28 bp, Artificial Sequence
  Description of Artificial Sequence: Synthetic primer
caatgatgggtattattctcgacatgga

SEQ ID NO: 20356 - DNA, 21 bp, Artificial Sequence
  Description of Artificial Sequence: Synthetic primer
gcagagcagaatctcctaccg

SEQ ID NO: 20357 - DNA, 21 bp, Artificial Sequence
  Description of Artificial Sequence: Synthetic primer
tgaaaatggccttgcaaaggg

SEQ ID NO: 20358 - DNA, 23 bp, Artificial Sequence
  Description of Artificial Sequence: Synthetic primer
ttgggtggaaaattttggtcagg

SEQ ID NO: 20359 - DNA, 28 bp, Artificial Sequence
  Description of Artificial Sequence: Synthetic primer
tgcgtactgctattctaaatccatagac

SEQ ID NO: 20360 - DNA, 21 bp, Artificial Sequence
  Description of Artificial Sequence: Synthetic primer
gcggatgtaatctccttggct

SEQ ID NO: 20361 - DNA, 28 bp, Artificial Sequence
  Description of Artificial Sequence: Synthetic primer
gaatccattgagcatctaaacttgttct

SEQ ID NO: 20362 - DNA, 21 bp, Artificial Sequence
  Description of Artificial Sequence: Synthetic primer
ccttttgtaagcccagcaaca

SEQ ID NO: 20363 - DNA, 21 bp, Artificial Sequence
  Description of Artificial Sequence: Synthetic primer
gggcgtgtatcacagggattt

SEQ ID NO: 20364 - DNA, 21 bp, Artificial Sequence
  Description of Artificial Sequence: Synthetic primer
ccgtgtgtgtgtctgatcgaa

SEQ ID NO: 20365 - DNA, 27 bp, Artificial Sequence
  Description of Artificial Sequence: Synthetic primer
tgtattgcgtaaatttcatctgcttgc

SEQ ID NO: 20366 - DNA, 27 bp, Artificial Sequence
  Description of Artificial Sequence: Synthetic primer
agaagggaaagtgtacataagaggcta

SEQ ID NO: 20367 - DNA, 27 bp, Artificial Sequence
  Description of Artificial Sequence: Synthetic primer
aatctttttctcagtgttgcaatcctc

SEQ ID NO: 20368 - DNA, 26 bp, Artificial Sequence
  Description of Artificial Sequence: Synthetic primer
ccttggatgggatttccaatatagca

SEQ ID NO: 20369 - DNA, 24 bp, Artificial Sequence
  Description of Artificial Sequence: Synthetic primer
ggaactaggctggaattgtaggag

SEQ ID NO: 20370 - DNA, 29 bp, Artificial Sequence
  Description of Artificial Sequence: Synthetic primer
ccagcataaatactacagtcaaacacaaa

SEQ ID NO: 20371 - DNA, 28 bp, Artificial Sequence
  Description of Artificial Sequence: Synthetic primer
cgtagacataaatcttgcccaacttttt

SEQ ID NO: 20372 - DNA, 27 bp, Artificial Sequence
  Description of Artificial Sequence: Synthetic primer
tgcaacacaggaaatagtttgaaatct

SEQ ID NO: 20373 - DNA, 28 bp, Artificial Sequence
  Description of Artificial Sequence: Synthetic primer
gcctatgaatattaaggcagtgatgacg

SEQ ID NO: 20374 - DNA, 21 bp, Artificial Sequence
  Description of Artificial Sequence: Synthetic primer
tgtctgatctcaaccaaggca

SEQ ID NO: 20375 - DNA, 21 bp, Artificial Sequence
  Description of Artificial Sequence: Synthetic primer
gggtgaggccgactaagtaga

SEQ ID NO: 20376 - DNA, 21 bp, Artificial Sequence
  Description of Artificial Sequence: Synthetic primer
aaagtctgcccatacaacggt

SEQ ID NO: 20377 - DNA, 27 bp, Artificial Sequence
  Description of Artificial Sequence: Synthetic primer
gatttaaccccatatttagctgttccg

SEQ ID NO: 20378 - DNA, 28 bp, Artificial Sequence
  Description of Artificial Sequence: Synthetic primer
cacatagtggtacagcaaacaaaatacc

SEQ ID NO: 20379 - DNA, 21 bp, Artificial Sequence
  Description of Artificial Sequence: Synthetic primer
ctcaggctcaaggccaatagg

SEQ ID NO: 20380 - DNA, 23 bp, Artificial Sequence
  Description of Artificial Sequence: Synthetic primer
acctaacgagatcaagacgaacc

SEQ ID NO: 20381 - DNA, 26 bp, Artificial Sequence
  Description of Artificial Sequence: Synthetic primer
tgtggaaaactgcaagaagtttaagg

SEQ ID NO: 20382 - DNA, 21 bp, Artificial Sequence
  Description of Artificial Sequence: Synthetic primer
acagaaggcttctctttcgtg

SEQ ID NO: 20383 - DNA, 25 bp, Artificial Sequence
  Description of Artificial Sequence: Synthetic primer
gccctggagcttcagctatattaag

SEQ ID NO: 20384 - DNA, 18 bp, Artificial Sequence
  Description of Artificial Sequence: Synthetic primer
cccagtcgcgggttgatt

SEQ ID NO: 20385 - DNA, 21 bp, Artificial Sequence
  Description of Artificial Sequence: Synthetic primer
gcatctccagacggtacacag

SEQ ID NO: 20386 - DNA, 24 bp, Artificial Sequence
  Description of Artificial Sequence: Synthetic primer
ctggaaaccttgtctcccgtattt

SEQ ID NO: 20387 - DNA, 21 bp, Artificial Sequence
  Description of Artificial Sequence: Synthetic primer
gacttgtccgtcaaaccaagg

SEQ ID NO: 20388 - DNA, 24 bp, Artificial Sequence
  Description of Artificial Sequence: Synthetic primer
atgccaagttttgttgtctccatt

SEQ ID NO: 20389 - DNA, 23 bp, Artificial Sequence
  Description of Artificial Sequence: Synthetic primer
actcgcaaatttgtgtgcaatga

SEQ ID NO: 20390 - DNA, 26 bp, Artificial Sequence
  Description of Artificial Sequence: Synthetic primer
cttctccacatctccatcttcatctt

SEQ ID NO: 20391 - DNA, 27 bp, Artificial Sequence
  Description of Artificial Sequence: Synthetic primer
accaggacattaaaagcccatgataat

SEQ ID NO: 20392 - DNA, 25 bp, Artificial Sequence
  Description of Artificial Sequence: Synthetic primer
gcaccctgatattacactggaaagt

SEQ ID NO: 20393 - DNA, 27 bp, Artificial Sequence
  Description of Artificial Sequence: Synthetic primer
ttccattcatttctagccaagcattag

SEQ ID NO: 20394 - DNA, 21 bp, Artificial Sequence
  Description of Artificial Sequence: Synthetic primer
ccggttccttctcaccttcag

SEQ ID NO: 20395 - DNA, 25 bp, Artificial Sequence
  Description of Artificial Sequence: Synthetic primer
tacatgttccaatacccaccaccta

SEQ ID NO: 20396 - DNA, 21 bp, Artificial Sequence
  Description of Artificial Sequence: Synthetic primer
ttgattacgaagacggcggtt

SEQ ID NO: 20397 - DNA, 21 bp, Artificial Sequence
  Description of Artificial Sequence: Synthetic primer
cgtgcggttccacagtcttta

SEQ ID NO: 20398 - DNA, 21 bp, Artificial Sequence
  Description of Artificial Sequence: Synthetic primer
gcgatctccatgaccttctct

SEQ ID NO: 20399 - DNA, 21 bp, Artificial Sequence
  Description of Artificial Sequence: Synthetic primer
tacagacagaatgcgcccatc

SEQ ID NO: 20400 - DNA, 19 bp, Artificial Sequence
  Description of Artificial Sequence: Synthetic primer
tgctgcctggaacttcagc

SEQ ID NO: 20401 - DNA, 28 bp, Artificial Sequence
  Description of Artificial Sequence: Synthetic primer
caaggatttgctaggctagaactataca

SEQ ID NO: 20402 - DNA, 24 bp, Artificial Sequence
  Description of Artificial Sequence: Synthetic primer
accgaggacagaatcaaacatagt

SEQ ID NO: 20403 - DNA, 27 bp, Artificial Sequence
  Description of Artificial Sequence: Synthetic primer
acatatgtacatatcgctccaacatga

SEQ ID NO: 20404 - DNA, 23 bp, Artificial Sequence
  Description of Artificial Sequence: Synthetic primer
ctgctggtacaataagagccagt

SEQ ID NO: 20405 - DNA, 25 bp, Artificial Sequence
  Description of Artificial Sequence: Synthetic primer
tcaataagcctatccaaggtagctg

SEQ ID NO: 20406 - DNA, 21 bp, Artificial Sequence
  Description of Artificial Sequence: Synthetic primer
caatctccccaacatgcgatg

SEQ ID NO: 20407 - DNA, 21 bp, Artificial Sequence
  Description of Artificial Sequence: Synthetic primer
catcttccccgcaaaccatct

SEQ ID NO: 20408 - DNA, 23 bp, Artificial Sequence
  Description of Artificial Sequence: Synthetic primer
tgaaggctctccttgatttcgac

SEQ ID NO: 20409 - DNA, 21 bp, Artificial Sequence
  Description of Artificial Sequence: Synthetic primer
acctaccgatgaatccaagcc

SEQ ID NO: 20410 - DNA, 22 bp, Artificial Sequence
  Description of Artificial Sequence: Synthetic primer
taatgcgcgatgtccttcttgg

SEQ ID NO: 20411 - DNA, 21 bp, Artificial Sequence
  Description of Artificial Sequence: Synthetic primer
gaactcaaacgtggcatcctg

SEQ ID NO: 20412 - DNA, 26 bp, Artificial Sequence
  Description of Artificial Sequence: Synthetic primer
gcatgtgcagagtaattttctttggg

SEQ ID NO: 20413 - DNA, 22 bp, Artificial Sequence
  Description of Artificial Sequence: Synthetic primer
aggcatttggaatgcacttcag

SEQ ID NO: 20414 - DNA, 26 bp, Artificial Sequence
  Description of Artificial Sequence: Synthetic primer
actgcaaactttgatcagaagattgg

SEQ ID NO: 20415 - DNA, 21 bp, Artificial Sequence
  Description of Artificial Sequence: Synthetic primer
ttagctatcacagccgacacg

SEQ ID NO: 20416 - DNA, 19 bp, Artificial Sequence
  Description of Artificial Sequence: Synthetic primer
accctctcggaggatacgc

SEQ ID NO: 20417 - DNA, 24 bp, Artificial Sequence
  Description of Artificial Sequence: Synthetic primer
ccatcatcaaactcgtgaggatca

SEQ ID NO: 20418 - DNA, 21 bp, Artificial Sequence
  Description of Artificial Sequence: Synthetic primer
catcaagtcgcgagaaagagc

SEQ ID NO: 20419 - DNA, 27 bp, Artificial Sequence
  Description of Artificial Sequence: Synthetic primer
cgatttatctcctctaaaacctccaca

SEQ ID NO: 20420 - DNA, 21 bp, Artificial Sequence
  Description of Artificial Sequence: Synthetic primer
gtagctgttgcccgacaaatc

SEQ ID NO: 20421 - DNA, 21 bp, Artificial Sequence
  Description of Artificial Sequence: Synthetic primer
tgccatactgccaagcattgt

SEQ ID NO: 20422 - DNA, 21 bp, Artificial Sequence
  Description of Artificial Sequence: Synthetic primer
caggcttcacctgtcattgga

SEQ ID NO: 20423 - DNA, 21 bp, Artificial Sequence
  Description of Artificial Sequence: Synthetic primer
atttgcagctgtgagctttgg

SEQ ID NO: 20424 - DNA, 26 bp, Artificial Sequence
  Description of Artificial Sequence: Synthetic primer
ctaactacaacatgatgcccaatcag

SEQ ID NO: 20425 - DNA, 21 bp, Artificial Sequence
  Description of Artificial Sequence: Synthetic primer
gttttggtcctggcagctaag

SEQ ID NO: 20426 - DNA, 21 bp, Artificial Sequence
  Description of Artificial Sequence: Synthetic primer
gaaaggtggttcgtccaagga

SEQ ID NO: 20427 - DNA, 28 bp, Artificial Sequence
  Description of Artificial Sequence: Synthetic primer
tcatctcaggaaatccatactagtcaga

SEQ ID NO: 20428 - DNA, 26 bp, Artificial Sequence
  Description of Artificial Sequence: Synthetic primer
gccattcaactattcaggctgtaaag

SEQ ID NO: 20429 - DNA, 21 bp, Artificial Sequence
  Description of Artificial Sequence: Synthetic primer
ttcgaaatgcttcaggaccca

SEQ ID NO: 20430 - DNA, 23 bp, Artificial Sequence
  Description of Artificial Sequence: Synthetic primer
ttgcttataggctcagacagagg

SEQ ID NO: 20431 - DNA, 28 bp, Artificial Sequence
  Description of Artificial Sequence: Synthetic primer
tctaagaacaagtaaatgcggaattcag

SEQ ID NO: 20432 - DNA, 21 bp, Artificial Sequence
  Description of Artificial Sequence: Synthetic primer
cacagatctgcgagcattggt

SEQ ID NO: 20433 - DNA, 21 bp, Artificial Sequence
  Description of Artificial Sequence: Synthetic primer
ttttcccaagtcaaggacagc

SEQ ID NO: 20434 - DNA, 21 bp, Artificial Sequence
  Description of Artificial Sequence: Synthetic primer
ttttacgtgcttgcgactgga

SEQ ID NO: 20435 - DNA, 28 bp, Artificial Sequence
  Description of Artificial Sequence: Synthetic primer
cctgggtgccttttaagctattatctag

SEQ ID NO: 20436 - DNA, 22 bp, Artificial Sequence
  Description of Artificial Sequence: Synthetic primer
gtgaagcaaacgtggaagaacc

SEQ ID NO: 20437 - DNA, 25 bp, Artificial Sequence
  Description of Artificial Sequence: Synthetic primer
tcaacctcctcctcatcataatcct

SEQ ID NO: 20438 - DNA, 23 bp, Artificial Sequence
  Description of Artificial Sequence: Synthetic primer
acgctaatcctgcttttgctatg

SEQ ID NO: 20439 - DNA, 22 bp, Artificial Sequence
  Description of Artificial Sequence: Synthetic primer
cagacttggtacaccattccca

SEQ ID NO: 20440 - DNA, 28 bp, Artificial Sequence
  Description of Artificial Sequence: Synthetic primer
cctataccttcttcactctcttcactca

SEQ ID NO: 20441 - DNA, 27 bp, Artificial Sequence
  Description of Artificial Sequence: Synthetic primer
acaatcaagaatcaagatgcaaggaca

SEQ ID NO: 20442 - DNA, 21 bp, Artificial Sequence
  Description of Artificial Sequence: Synthetic primer
ttgcagcaattgaagctggga

SEQ ID NO: 20443 - DNA, 28 bp, Artificial Sequence
  Description of Artificial Sequence: Synthetic primer
tctactaacgaactaaaatgaaggtggt

SEQ ID NO: 20444 - DNA, 25 bp, Artificial Sequence
  Description of Artificial Sequence: Synthetic primer
ctggttttattgcaatctgatgcca

SEQ ID NO: 20445 - DNA, 21 bp, Artificial Sequence
  Description of Artificial Sequence: Synthetic primer
tgcagcagatcctttgtggtg

SEQ ID NO: 20446 - DNA, 27 bp, Artificial Sequence
  Description of Artificial Sequence: Synthetic primer
ttctttccagccaagagattttaggaa

SEQ ID NO: 20447 - DNA, 28 bp, Artificial Sequence
  Description of Artificial Sequence: Synthetic primer
tttgcactttcaaggagaaacaatttga

SEQ ID NO: 20448 - DNA, 22 bp, Artificial Sequence
  Description of Artificial Sequence: Synthetic primer
ggagggagggagaatgcttatg

SEQ ID NO: 20449 - DNA, 23 bp, Artificial Sequence
  Description of Artificial Sequence: Synthetic primer
tcagagtggtagcttagtggtgt

SEQ ID NO: 20450 - DNA, 21 bp, Artificial Sequence
  Description of Artificial Sequence: Synthetic primer
ccgcgaataggaggcaaatga

SEQ ID NO: 20451 - DNA, 27 bp, Artificial Sequence
  Description of Artificial Sequence: Synthetic primer
gggtatggtaacttctactgtgaactg

SEQ ID NO: 20452 - DNA, 24 bp, Artificial Sequence
  Description of Artificial Sequence: Synthetic primer
actcggtttgagagtctcgtaatg

SEQ ID NO: 20453 - DNA, 22 bp, Artificial Sequence
  Description of Artificial Sequence: Synthetic primer
caacatcccagtttctggtggt

SEQ ID NO: 20454 - DNA, 24 bp, Artificial Sequence
  Description of Artificial Sequence: Synthetic primer
cctagctgtctaacagattttgcg

SEQ ID NO: 20455 - DNA, 23 bp, Artificial Sequence
  Description of Artificial Sequence: Synthetic primer
caccagagacgggatacactatc

SEQ ID NO: 20456 - DNA, 22 bp, Artificial Sequence
  Description of Artificial Sequence: Synthetic primer
tatggaagttccacaggagcac

SEQ ID NO: 20457 - DNA, 21 bp, Artificial Sequence
  Description of Artificial Sequence: Synthetic primer
gacagcagcattcactgcatc

SEQ ID NO: 20458 - DNA, 27 bp, Artificial Sequence
  Description of Artificial Sequence: Synthetic primer
ttcatgaaatttgcatctttctggctt

SEQ ID NO: 20459 - DNA, 24 bp, Artificial Sequence
  Description of Artificial Sequence: Synthetic primer
ggccggaggattcttcttaagaac

SEQ ID NO: 20460 - DNA, 26 bp, Artificial Sequence
  Description of Artificial Sequence: Synthetic primer
tgcaggagatcaagacttgaactatt

SEQ ID NO: 20461 - DNA, 24 bp, Artificial Sequence
  Description of Artificial Sequence: Synthetic primer
agtacgtactgactgtctaacgga

SEQ ID NO: 20462 - DNA, 21 bp, Artificial Sequence
  Description of Artificial Sequence: Synthetic primer
ccgtagctagctctgcatcaa

SEQ ID NO: 20463 - DNA, 23 bp, Artificial Sequence
  Description of Artificial Sequence: Synthetic primer
gatatcgagctgccatctgactt

SEQ ID NO: 20464 - DNA, 21 bp, Artificial Sequence
  Description of Artificial Sequence: Synthetic primer
ccacaccatgttcgcaaatgt

SEQ ID NO: 20465 - DNA, 22 bp, Artificial Sequence
  Description of Artificial Sequence: Synthetic primer
cctctttgcacttgcgatatgg

SEQ ID NO: 20466 - DNA, 22 bp, Artificial Sequence
  Description of Artificial Sequence: Synthetic primer
aggttaaatgtcccatcgctgt

SEQ ID NO: 20467 - DNA, 24 bp, Artificial Sequence
  Description of Artificial Sequence: Synthetic primer
cagagatattgctctcacaagggt

SEQ ID NO: 20468 - DNA, 21 bp, Artificial Sequence
  Description of Artificial Sequence: Synthetic primer
ctaagcaatccagccatgcca

SEQ ID NO: 20469 - DNA, 21 bp, Artificial Sequence
  Description of Artificial Sequence: Synthetic primer
cacgtttcatgcgcttcttcc

SEQ ID NO: 20470 - DNA, 23 bp, Artificial Sequence
  Description of Artificial Sequence: Synthetic primer
gacctcctgaatgcatacacact

SEQ ID NO: 20471 - DNA, 23 bp, Artificial Sequence
  Description of Artificial Sequence: Synthetic primer
gctagtgagcgttcaatttggaa

SEQ ID NO: 20472 - DNA, 21 bp, Artificial Sequence
  Description of Artificial Sequence: Synthetic primer
tgatgttgccaagccagaaca

SEQ ID NO: 20473 - DNA, 21 bp, Artificial Sequence
  Description of Artificial Sequence: Synthetic primer
gagcgatgttggccaacctta

SEQ ID NO: 20474 - DNA, 24 bp, Artificial Sequence
  Description of Artificial Sequence: Synthetic primer
agaatccacttgtacatccatgct

SEQ ID NO: 20475 - DNA, 22 bp, Artificial Sequence
  Description of Artificial Sequence: Synthetic primer
cggtggaagaagatgctgatgg

SEQ ID NO: 20476 - DNA, 22 bp, Artificial Sequence
  Description of Artificial Sequence: Synthetic primer
acgcatgccactcatctatgtg

SEQ ID NO: 20477 - DNA, 24 bp, Artificial Sequence
  Description of Artificial Sequence: Synthetic primer
gcaataagcataactgtaccgcat

SEQ ID NO: 20478 - DNA, 22 bp, Artificial Sequence
  Description of Artificial Sequence: Synthetic primer
ggatgtccgtatccaagcttga

SEQ ID NO: 20479 - DNA, 22 bp, Artificial Sequence
  Description of Artificial Sequence: Synthetic primer
tcttcagagcctgacatggaga

SEQ ID NO: 20480 - DNA, 21 bp, Artificial Sequence
  Description of Artificial Sequence: Synthetic primer
ttgcaaggaagtgcaaccaat

SEQ ID NO: 20481 - DNA, 25 bp, Artificial Sequence
  Description of Artificial Sequence: Synthetic primer
acggcgatagttttatgttagaggt

SEQ ID NO: 20482 - DNA, 28 bp, Artificial Sequence
  Description of Artificial Sequence: Synthetic primer
acttgaaggaaatctttggaaagtttgg

SEQ ID NO: 20483 - DNA, 22 bp, Artificial Sequence
  Description of Artificial Sequence: Synthetic primer
acgcgaagaacgactcatatcc

SEQ ID NO: 20484 - DNA, 21 bp, Artificial Sequence
  Description of Artificial Sequence: Synthetic primer
ttgacgtgccgaatagcatcc

SEQ ID NO: 20485 - DNA, 28 bp, Artificial Sequence
  Description of Artificial Sequence: Synthetic primer
actcatgccttcttcttcaatactttca

SEQ ID NO: 20486 - DNA, 23 bp, Artificial Sequence
  Description of Artificial Sequence: Synthetic primer
cctcgtgcctagcaagtatttca

SEQ ID NO: 20487 - DNA, 26 bp, Artificial Sequence
  Description of Artificial Sequence: Synthetic primer
agccacttttgtcttaagaatagcca

SEQ ID NO: 20488 - DNA, 22 bp, Artificial Sequence
  Description of Artificial Sequence: Synthetic primer
aactacatttgcctgctgacct

SEQ ID NO: 20489 - DNA, 23 bp, Artificial Sequence
  Description of Artificial Sequence: Synthetic primer
cagaagcacatctacagatgggt

SEQ ID NO: 20490 - DNA, 24 bp, Artificial Sequence
  Description of Artificial Sequence: Synthetic primer
gcaatggcatcatcaacgacatac

SEQ ID NO: 20491 - DNA, 19 bp, Artificial Sequence
  Description of Artificial Sequence: Synthetic primer
acggcgaacttggtgactt

SEQ ID NO: 20492 - DNA, 26 bp, Artificial Sequence
  Description of Artificial Sequence: Synthetic primer
caccttatacactgcaaaccaaacat

SEQ ID NO: 20493 - DNA, 22 bp, Artificial Sequence
  Description of Artificial Sequence: Synthetic primer
aggataaagacggtttccgctt

SEQ ID NO: 20494 - DNA, 24 bp, Artificial Sequence
  Description of Artificial Sequence: Synthetic primer
atggagatcacaggtaccattctg

SEQ ID NO: 20495 - DNA, 27 bp, Artificial Sequence
  Description of Artificial Sequence: Synthetic primer
cacctgaatgaacgtccacataaaatt

SEQ ID NO: 20496 - DNA, 24 bp, Artificial Sequence
  Description of Artificial Sequence: Synthetic primer
tcgagagagtgtacacaagattgc

SEQ ID NO: 20497 - DNA, 25 bp, Artificial Sequence
  Description of Artificial Sequence: Synthetic primer
gccattcaaatgcatgataccatcc

SEQ ID NO: 20498 - DNA, 24 bp, Artificial Sequence
  Description of Artificial Sequence: Synthetic primer
tcctaagaaggctattgagtctgc

SEQ ID NO: 20499 - DNA, 21 bp, Artificial Sequence
  Description of Artificial Sequence: Synthetic primer
ctgggaacatcagggatggac

SEQ ID NO: 20500 - DNA, 27 bp, Artificial Sequence
  Description of Artificial Sequence: Synthetic primer
tcatcaccacgaactagaggtatgtat

SEQ ID NO: 20501 - DNA, 30 bp, Artificial Sequence
  Description of Artificial Sequence: Synthetic primer
aaaagcaagatttgaactgaattgtgatga

SEQ ID NO: 20502 - DNA, 21 bp, Artificial Sequence
  Description of Artificial Sequence: Synthetic primer
gcatgatctgcccacacattg

SEQ ID NO: 20503 - DNA, 19 bp, Artificial Sequence
  Description of Artificial Sequence: Synthetic primer
aaggcggtatcggcttaca

SEQ ID NO: 20504 - DNA, 22 bp, Artificial Sequence
  Description of Artificial Sequence: Synthetic primer
ccggagccattgattggtaaga

SEQ ID NO: 20505 - DNA, 18 bp, Artificial Sequence
  Description of Artificial Sequence: Synthetic primer
gatgatcccggcgcatcc

SEQ ID NO: 20506 - DNA, 19 bp, Artificial Sequence
  Description of Artificial Sequence: Synthetic primer
gtactgggctcagcggatc

SEQ ID NO: 20507 - DNA, 27 bp, Artificial Sequence
  Description of Artificial Sequence: Synthetic primer
tggatcagtgcagtaagtaaagatctg

SEQ ID NO: 20508 - DNA, 21 bp, Artificial Sequence
  Description of Artificial Sequence: Synthetic primer
catttgttagctcggctgctc

SEQ ID NO: 20509 - DNA, 25 bp, Artificial Sequence
  Description of Artificial Sequence: Synthetic primer
ttgccttttgggtttctttgatgtt

SEQ ID NO: 20510 - DNA, 22 bp, Artificial Sequence
  Description of Artificial Sequence: Synthetic primer
tacatgtgatgcggtgtgtagc

SEQ ID NO: 20511 - DNA, 28 bp, Artificial Sequence
  Description of Artificial Sequence: Synthetic primer
cctttgttctgggcaatcatgatttatt

SEQ ID NO: 20512 - DNA, 24 bp, Artificial Sequence
  Description of Artificial Sequence: Synthetic primer
gtgcagatacacgtttaagctgtc

SEQ ID NO: 20513 - DNA, 22 bp, Artificial Sequence
  Description of Artificial Sequence: Synthetic primer
tgcagcattttgactcttcacg

SEQ ID NO: 20514 - DNA, 22 bp, Artificial Sequence
  Description of Artificial Sequence: Synthetic primer
ctctcggacagctagatagcac

SEQ ID NO: 20515 - DNA, 24 bp, Artificial Sequence
  Description of Artificial Sequence: Synthetic primer
acaaagtgacagaggagtaagctc

SEQ ID NO: 20516 - DNA, 27 bp, Artificial Sequence
  Description of Artificial Sequence: Synthetic primer
ttgatttcttaaataatcgggcgacag

SEQ ID NO: 20517 - DNA, 21 bp, Artificial Sequence
  Description of Artificial Sequence: Synthetic primer
aatcacagcgctttcgttgaa

SEQ ID NO: 20518 - DNA, 28 bp, Artificial Sequence
  Description of Artificial Sequence: Synthetic primer
ggagctgatgcatactattatggaacat

SEQ ID NO: 20519 - DNA, 21 bp, Artificial Sequence
  Description of Artificial Sequence: Synthetic primer
ctgcgcctagagagagacaga

SEQ ID NO: 20520 - DNA, 23 bp, Artificial Sequence
  Description of Artificial Sequence: Synthetic primer
gggccatgtctgtagttgatttg

SEQ ID NO: 20521 - DNA, 28 bp, Artificial Sequence
  Description of Artificial Sequence: Synthetic primer
ggcatgtgcagatttgttactttagatg

SEQ ID NO: 20522 - DNA, 22 bp, Artificial Sequence
  Description of Artificial Sequence: Synthetic primer
ggcgtacctagagaaagagagc

SEQ ID NO: 20523 - DNA, 23 bp, Artificial Sequence
  Description of Artificial Sequence: Synthetic primer
tcagagaagttaactggctgcat

SEQ ID NO: 20524 - DNA, 24 bp, Artificial Sequence
  Description of Artificial Sequence: Synthetic primer
agtatttgcaccacacatgttgtt

SEQ ID NO: 20525 - DNA, 21 bp, Artificial Sequence
  Description of Artificial Sequence: Synthetic primer
cccattcccatgtacagcact

SEQ ID NO: 20526 - DNA, 26 bp, Artificial Sequence
  Description of Artificial Sequence: Synthetic primer
aaaagacaaacagattgtggattggt

SEQ ID NO: 20527 - DNA, 21 bp, Artificial Sequence
  Description of Artificial Sequence: Synthetic primer
acaaaaagggccacatgtgtc

SEQ ID NO: 20528 - DNA, 21 bp, Artificial Sequence
  Description of Artificial Sequence: Synthetic primer
tacagtgctgcactctctcca

SEQ ID NO: 20529 - DNA, 28 bp, Artificial Sequence
  Description of Artificial Sequence: Synthetic primer
tctaccacatgtgctaaatgaagatttg

SEQ ID NO: 20530 - DNA, 24 bp, Artificial Sequence
  Description of Artificial Sequence: Synthetic primer
acagtgatgcttgtacacttttgg

SEQ ID NO: 20531 - DNA, 21 bp, Artificial Sequence
  Description of Artificial Sequence: Synthetic primer
cttcgtaagaaccagcacgga

SEQ ID NO: 20532 - DNA, 28 bp, Artificial Sequence
  Description of Artificial Sequence: Synthetic primer
cctagtaaaccatccttttggattctca

SEQ ID NO: 20533 - DNA, 28 bp, Artificial Sequence
  Description of Artificial Sequence: Synthetic primer
ggttccagtgcagaaacttctatctaat

SEQ ID NO: 20534 - DNA, 26 bp, Artificial Sequence
  Description of Artificial Sequence: Synthetic primer
acatgttgaggatggaaatttccaga

SEQ ID NO: 20535 - DNA, 28 bp, Artificial Sequence
  Description of Artificial Sequence: Synthetic primer
tgattctgcccagttgtctttatgttat

SEQ ID NO: 20536 - DNA, 26 bp, Artificial Sequence
  Description of Artificial Sequence: Synthetic primer
tgcatatctatactgcacgcatacat

SEQ ID NO: 20537 - DNA, 26 bp, Artificial Sequence
  Description of Artificial Sequence: Synthetic primer
gcttaatcctcctttttggttgactg

SEQ ID NO: 20538 - DNA, 27 bp, Artificial Sequence
  Description of Artificial Sequence: Synthetic primer
ggtaaaaagaagtagcctattgcaacg

SEQ ID NO: 20539 - DNA, 21 bp, Artificial Sequence
  Description of Artificial Sequence: Synthetic primer
atgtcgccttgctacttgtga

SEQ ID NO: 20540 - DNA, 26 bp, Artificial Sequence
  Description of Artificial Sequence: Synthetic primer
gcaatgtgctctagaaaactctctga

SEQ ID NO: 20541 - DNA, 21 bp, Artificial Sequence
  Description of Artificial Sequence: Synthetic primer
actacgcatttggactgccat

SEQ ID NO: 20542 - DNA, 21 bp, Artificial Sequence
  Description of Artificial Sequence: Synthetic primer
aggtccgcaatgaggagagaa

SEQ ID NO: 20543 - DNA, 27 bp, Artificial Sequence
  Description of Artificial Sequence: Synthetic primer
aactgtgtaacaagagtgtactaggtc

SEQ ID NO: 20544 - DNA, 24 bp, Artificial Sequence
  Description of Artificial Sequence: Synthetic primer
agcaatggctatgcttttgatgag

SEQ ID NO: 20545 - DNA, 23 bp, Artificial Sequence
  Description of Artificial Sequence: Synthetic primer
actacctccgttccattgaactg

SEQ ID NO: 20546 - DNA, 27 bp, Artificial Sequence
  Description of Artificial Sequence: Synthetic primer
acctttagcaattgtcacaaaatctgg

SEQ ID NO: 20547 - DNA, 23 bp, Artificial Sequence
  Description of Artificial Sequence: Synthetic primer
ggtttgtgtccatgtaacagggt

SEQ ID NO: 20548 - DNA, 21 bp, Artificial Sequence
  Description of Artificial Sequence: Synthetic primer
acttcatgactggtgcagtgt

SEQ ID NO: 20549 - DNA, 27 bp, Artificial Sequence
  Description of Artificial Sequence: Synthetic primer
agtatgttctagaggttgtaagctgtg

SEQ ID NO: 20550 - DNA, 28 bp, Artificial Sequence
  Description of Artificial Sequence: Synthetic primer
tctcatcatacaatgctcttttctcctc

SEQ ID NO: 20551 - DNA, 23 bp, Artificial Sequence
  Description of Artificial Sequence: Synthetic primer
acagatggatacactggcaaaca

SEQ ID NO: 20552 - DNA, 23 bp, Artificial Sequence
  Description of Artificial Sequence: Synthetic primer
atggcatgactcactatcaagca

SEQ ID NO: 20553 - DNA, 21 bp, Artificial Sequence
  Description of Artificial Sequence: Synthetic primer
aggtaggtcccaacaccaagc

SEQ ID NO: 20554 - DNA, 23 bp, Artificial Sequence
  Description of Artificial Sequence: Synthetic primer
aacatggaccgtgtgagttactt

SEQ ID NO: 20555 - DNA, 28 bp, Artificial Sequence
  Description of Artificial Sequence: Synthetic primer
cgctgaagatgttgttgttattgaatca

SEQ ID NO: 20556 - DNA, 26 bp, Artificial Sequence
  Description of Artificial Sequence: Synthetic primer
accacatatgaaaggaacaaccaaga

SEQ ID NO: 20557 - DNA, 21 bp, Artificial Sequence
  Description of Artificial Sequence: Synthetic primer
aagttggagtcaccaagacca

SEQ ID NO: 20558 - DNA, 20 bp, Artificial Sequence
  Description of Artificial Sequence: Synthetic primer
gtgtgtggcttcgggagtta

SEQ ID NO: 20559 - DNA, 23 bp, Artificial Sequence
  Description of Artificial Sequence: Synthetic primer
agtcacgtaaacttgtggctagg

SEQ ID NO: 20560 - DNA, 23 bp, Artificial Sequence
  Description of Artificial Sequence: Synthetic primer
atggatgtatcagcccttagtgg

SEQ ID NO: 20561 - DNA, 24 bp, Artificial Sequence
  Description of Artificial Sequence: Synthetic primer
ggcctaacaacttggagattgatg

SEQ ID NO: 20562 - DNA, 25 bp, Artificial Sequence
  Description of Artificial Sequence: Synthetic primer
gaattcatattaccatccccaccgt

SEQ ID NO: 20563 - DNA, 22 bp, Artificial Sequence
  Description of Artificial Sequence: Synthetic primer
agaacgtgctgagatgaaggtt

SEQ ID NO: 20564 - DNA, 24 bp, Artificial Sequence
  Description of Artificial Sequence: Synthetic primer
tgagaatcatgtcagtggcattct

SEQ ID NO: 20565 - DNA, 20 bp, Artificial Sequence
  Description of Artificial Sequence: Synthetic primer
tgtcaagcaaggttgcctca

SEQ ID NO: 20566 - DNA, 22 bp, Artificial Sequence
  Description of Artificial Sequence: Synthetic primer
gtgctggagttgtgtatcctga

SEQ ID NO: 20567 - DNA, 25 bp, Artificial Sequence
  Description of Artificial Sequence: Synthetic primer
agcattggcatgtaaaaactatggg

SEQ ID NO: 20568 - DNA, 21 bp, Artificial Sequence
  Description of Artificial Sequence: Synthetic primer
ccacttttaccatgccagcct

SEQ ID NO: 20569 - DNA, 25 bp, Artificial Sequence
  Description of Artificial Sequence: Synthetic primer
gatcaatgtttagtctcacgtgcat

SEQ ID NO: 20570 - DNA, 19 bp, Artificial Sequence
  Description of Artificial Sequence: Synthetic primer
ctgcacctgtcatccctgt

SEQ ID NO: 20571 - DNA, 28 bp, Artificial Sequence
  Description of Artificial Sequence: Synthetic primer
acactgttgttcctactgcatacaataa

SEQ ID NO: 20572 - DNA, 22 bp, Artificial Sequence
  Description of Artificial Sequence: Synthetic primer
gatgtgaagcggtaacggaaga

SEQ ID NO: 20573 - DNA, 28 bp, Artificial Sequence
  Description of Artificial Sequence: Synthetic primer
gttggtgtcaattttaagtgttgtaagc

SEQ ID NO: 20574 - DNA, 19 bp, Artificial Sequence
  Description of Artificial Sequence: Synthetic primer
cttccatcggcagcagtca

SEQ ID NO: 20575 - DNA, 27 bp, Artificial Sequence
  Description of Artificial Sequence: Synthetic primer
ctcaccattaagccacaacgagtatat

SEQ ID NO: 20576 - DNA, 28 bp, Artificial Sequence
  Description of Artificial Sequence: Synthetic primer
gcttgccaactatctaaataacagcatt

SEQ ID NO: 20577 - DNA, 21 bp, Artificial Sequence
  Description of Artificial Sequence: Synthetic primer
gctcttcttcatgtcgctggt

SEQ ID NO: 20578 - DNA, 26 bp, Artificial Sequence
  Description of Artificial Sequence: Synthetic primer
tcccctgcttaaattcttgcatattg

SEQ ID NO: 20579 - DNA, 24 bp, Artificial Sequence
  Description of Artificial Sequence: Synthetic primer
gctctcctgaatccaacgacataa

SEQ ID NO: 20580 - DNA, 27 bp, Artificial Sequence
  Description of Artificial Sequence: Synthetic primer
tgagaagaagaacaagaatgaggttgg

SEQ ID NO: 20581 - DNA, 23 bp, Artificial Sequence
  Description of Artificial Sequence: Synthetic primer
tcaaaccctctgaactcgttcac

SEQ ID NO: 20582 - DNA, 25 bp, Artificial Sequence
  Description of Artificial Sequence: Synthetic primer
ctttccagtgatgtcactattgtgc

SEQ ID NO: 20583 - DNA, 21 bp, Artificial Sequence
  Description of Artificial Sequence: Synthetic primer
aaaacaaaggcctccctcgtg

SEQ ID NO: 20584 - DNA, 24 bp, Artificial Sequence
  Description of Artificial Sequence: Synthetic primer
acgtcgtctgtggtgtataaccta

SEQ ID NO: 20585 - DNA, 28 bp, Artificial Sequence
  Description of Artificial Sequence: Synthetic primer
tttttcattatgtataaagctcgcggtt

SEQ ID NO: 20586 - DNA, 19 bp, Artificial Sequence
  Description of Artificial Sequence: Synthetic primer
ctgctcaccacgctgatgg

SEQ ID NO: 20587 - DNA, 21 bp, Artificial Sequence
  Description of Artificial Sequence: Synthetic primer
ttggttctgcctagacctgtg

SEQ ID NO: 20588 - DNA, 28 bp, Artificial Sequence
  Description of Artificial Sequence: Synthetic primer
ccaaagcaaatttgatacggtaatgtct

SEQ ID NO: 20589 - DNA, 26 bp, Artificial Sequence
  Description of Artificial Sequence: Synthetic primer
gtcaaagccctttgaaaattcatcct

SEQ ID NO: 20590 - DNA, 21 bp, Artificial Sequence
  Description of Artificial Sequence: Synthetic primer
aaagatccaggccaggtgttc

SEQ ID NO: 20591 - DNA, 21 bp, Artificial Sequence
  Description of Artificial Sequence: Synthetic primer
atccttccaagaggagaggga

SEQ ID NO: 20592 - DNA, 25 bp, Artificial Sequence
  Description of Artificial Sequence: Synthetic primer
accaacataagaccgatgaagaact

SEQ ID NO: 20593 - DNA, 27 bp, Artificial Sequence
  Description of Artificial Sequence: Synthetic primer
gcgcttgcgtatcaactattgaaatta

SEQ ID NO: 20594 - DNA, 26 bp, Artificial Sequence
  Description of Artificial Sequence: Synthetic primer
ggcaggtaagtgaggcatcatatatc

SEQ ID NO: 20595 - DNA, 25 bp, Artificial Sequence
  Description of Artificial Sequence: Synthetic primer
acccaccaagtagttctttctggta

SEQ ID NO: 20596 - DNA, 21 bp, Artificial Sequence
  Description of Artificial Sequence: Synthetic primer
gatatggtggagcgggttagc

SEQ ID NO: 20597 - DNA, 21 bp, Artificial Sequence
  Description of Artificial Sequence: Synthetic primer
tctgcagtgtgcaacactctt

SEQ ID NO: 20598 - DNA, 21 bp, Artificial Sequence
  Description of Artificial Sequence: Synthetic primer
ctctgctattgtcaccatgcg

SEQ ID NO: 20599 - DNA, 22 bp, Artificial Sequence
  Description of Artificial Sequence: Synthetic primer
ttactggtttgtgcccatgttg

SEQ ID NO: 20600 - DNA, 28 bp, Artificial Sequence
  Description of Artificial Sequence: Synthetic primer
tgattatccgattgtcagtcaaataggg

SEQ ID NO: 20601 - DNA, 25 bp, Artificial Sequence
  Description of Artificial Sequence: Synthetic primer
ccctgatagcttgatcttatgctct

SEQ ID NO: 20602 - DNA, 27 bp, Artificial Sequence
  Description of Artificial Sequence: Synthetic primer
tttcagaaagacagaaactccatagca

SEQ ID NO: 20603 - DNA, 21 bp, Artificial Sequence
  Description of Artificial Sequence: Synthetic primer
tggctctgcaaatggagatca

SEQ ID NO: 20604 - DNA, 27 bp, Artificial Sequence
  Description of Artificial Sequence: Synthetic primer
ggtaacagtttgtttcttctcccattg

SEQ ID NO: 20605 - DNA, 21 bp, Artificial Sequence
  Description of Artificial Sequence: Synthetic primer
cgtcatgggtgctactactgg

SEQ ID NO: 20606 - DNA, 29 bp, Artificial Sequence
  Description of Artificial Sequence: Synthetic primer
aacatggttttataaagctcaagttccat

SEQ ID NO: 20607 - DNA, 24 bp, Artificial Sequence
  Description of Artificial Sequence: Synthetic primer
gcaagcaacaacgtacaagaatga

SEQ ID NO: 20608 - DNA, 25 bp, Artificial Sequence
  Description of Artificial Sequence: Synthetic primer
tgtaaatatgaagaggaggttggca

SEQ ID NO: 20609 - DNA, 21 bp, Artificial Sequence
  Description of Artificial Sequence: Synthetic primer
ttgccgttggaaaagcaaaga

SEQ ID NO: 20610 - DNA, 24 bp, Artificial Sequence
  Description of Artificial Sequence: Synthetic primer
aggagaccatcttcattgtatgcc

SEQ ID NO: 20611 - DNA, 26 bp, Artificial Sequence
  Description of Artificial Sequence: Synthetic primer
tgtgtgttatttccatgtgtgcttac

SEQ ID NO: 20612 - DNA, 24 bp, Artificial Sequence
  Description of Artificial Sequence: Synthetic primer
actggatggacgagaactacatct

SEQ ID NO: 20613 - DNA, 28 bp, Artificial Sequence
  Description of Artificial Sequence: Synthetic primer
ggttagcatagtagtatcgtcctaggag

SEQ ID NO: 20614 - DNA, 19 bp, Artificial Sequence
  Description of Artificial Sequence: Synthetic primer
gtggacgctgctctgttcc

SEQ ID NO: 20615 - DNA, 21 bp, Artificial Sequence
  Description of Artificial Sequence: Synthetic primer
gaagcttcggtccctgtttcc

SEQ ID NO: 20616 - DNA, 22 bp, Artificial Sequence
  Description of Artificial Sequence: Synthetic primer
caagtgcccatgagactcagat

SEQ ID NO: 20617 - DNA, 20 bp, Artificial Sequence
  Description of Artificial Sequence: Synthetic primer
aattgagggaggcctggatg

SEQ ID NO: 20618 - DNA, 21 bp, Artificial Sequence
  Description of Artificial Sequence: Synthetic primer
catccgaaattgcgacgtgaa

SEQ ID NO: 20619 - DNA, 21 bp, Artificial Sequence
  Description of Artificial Sequence: Synthetic primer
tcagtctgcacaggtagggaa

SEQ ID NO: 20620 - DNA, 26 bp, Artificial Sequence
  Description of Artificial Sequence: Synthetic primer
gatgtaggtctgtttttgctgtacac

SEQ ID NO: 20621 - DNA, 22 bp, Artificial Sequence
  Description of Artificial Sequence: Synthetic primer
tgtccaccaatcaagcttagga

SEQ ID NO: 20622 - DNA, 28 bp, Artificial Sequence
  Description of Artificial Sequence: Synthetic primer
agagaaagtgtttatgatgcacaaggta

SEQ ID NO: 20623 - DNA, 28 bp, Artificial Sequence
  Description of Artificial Sequence: Synthetic primer
ctggacgcatatctttaggttcatgtaa

SEQ ID NO: 20624 - DNA, 26 bp, Artificial Sequence
  Description of Artificial Sequence: Synthetic primer
gtggcttgcaaaacaaaaatttgtct

SEQ ID NO: 20625 - DNA, 28 bp, Artificial Sequence
  Description of Artificial Sequence: Synthetic primer
actctacattgtcatatacatcgtggtc

SEQ ID NO: 20626 - DNA, 28 bp, Artificial Sequence
  Description of Artificial Sequence: Synthetic primer
tgttcactttcacagtaatatggtcctt

SEQ ID NO: 20627 - DNA, 25 bp, Artificial Sequence
  Description of Artificial Sequence: Synthetic primer
gattcatgctgtatggatcacaagc

SEQ ID NO: 20628 - DNA, 28 bp, Artificial Sequence
  Description of Artificial Sequence: Synthetic primer
tttctggtttcctagcaattggatattg

SEQ ID NO: 20629 - DNA, 29 bp, Artificial Sequence
  Description of Artificial Sequence: Synthetic primer
ttttattcttctggagttcatccatgtct

SEQ ID NO: 20630 - DNA, 24 bp, Artificial Sequence
  Description of Artificial Sequence: Synthetic primer
cctcaaaaatctttgaccgagctt

SEQ ID NO: 20631 - DNA, 27 bp, Artificial Sequence
  Description of Artificial Sequence: Synthetic primer
cctcggtactacattctaaagttcctt

SEQ ID NO: 20632 - DNA, 22 bp, Artificial Sequence
  Description of Artificial Sequence: Synthetic primer
aatctggaatgttgccgttgag

SEQ ID NO: 20633 - DNA, 25 bp, Artificial Sequence
  Description of Artificial Sequence: Synthetic primer
gggcatatgaacttctccacaaatg

SEQ ID NO: 20634 - DNA, 22 bp, Artificial Sequence
  Description of Artificial Sequence: Synthetic primer
ggctccttccagtaaatgcaga

SEQ ID NO: 20635 - DNA, 22 bp, Artificial Sequence
  Description of Artificial Sequence: Synthetic primer
gcaggagcctctgtctttgtta

SEQ ID NO: 20636 - DNA, 19 bp, Artificial Sequence
  Description of Artificial Sequence: Synthetic primer
cagcttcgcgcaccttcta

SEQ ID NO: 20637 - DNA, 21 bp, Artificial Sequence
  Description of Artificial Sequence: Synthetic primer
cattgcccactcatagatgcg

SEQ ID NO: 20638 - DNA, 22 bp, Artificial Sequence
  Description of Artificial Sequence: Synthetic primer
ggtcaacggagctgataaggat

SEQ ID NO: 20639 - DNA, 28 bp, Artificial Sequence
  Description of Artificial Sequence: Synthetic primer
aggagcttatggataacataggtacact

SEQ ID NO: 20640 - DNA, 28 bp, Artificial Sequence
  Description of Artificial Sequence: Synthetic primer
ggcaagtggcaatcaataataatctcaa

SEQ ID NO: 20641 - DNA, 21 bp, Artificial Sequence
  Description of Artificial Sequence: Synthetic primer
gtctgtgggcattcaacaagc

SEQ ID NO: 20642 - DNA, 23 bp, Artificial Sequence
  Description of Artificial Sequence: Synthetic primer
aggtcactcagtacaagaagggt

SEQ ID NO: 20643 - DNA, 27 bp, Artificial Sequence
  Description of Artificial Sequence: Synthetic primer
agaagacctatatagcaccaaacagtg

SEQ ID NO: 20644 - DNA, 23 bp, Artificial Sequence
  Description of Artificial Sequence: Synthetic primer
ggtagaaaacctcctgagaggct

SEQ ID NO: 20645 - DNA, 26 bp, Artificial Sequence
  Description of Artificial Sequence: Synthetic primer
cacagtgtggctagtcttaggaaatt

SEQ ID NO: 20646 - DNA, 26 bp, Artificial Sequence
  Description of Artificial Sequence: Synthetic primer
tccatgatccctgtaaccaagtaatt

SEQ ID NO: 20647 - DNA, 22 bp, Artificial Sequence
  Description of Artificial Sequence: Synthetic primer
acatgcaagcaacacgaattgt

SEQ ID NO: 20648 - DNA, 21 bp, Artificial Sequence
  Description of Artificial Sequence: Synthetic primer
gcagcctgatcaacaatcgtc

SEQ ID NO: 20649 - DNA, 21 bp, Artificial Sequence
  Description of Artificial Sequence: Synthetic primer
agtaaacgttggtgactgcca

SEQ ID NO: 20650 - DNA, 29 bp, Artificial Sequence
  Description of Artificial Sequence: Synthetic primer
aagctgctacagagaatttagagaagtac

SEQ ID NO: 20651 - DNA, 23 bp, Artificial Sequence
  Description of Artificial Sequence: Synthetic primer
actcctcatgctgttcagtcatt

SEQ ID NO: 20652 - DNA, 28 bp, Artificial Sequence
  Description of Artificial Sequence: Synthetic primer
aagatgcataggagaaaatggtctgaaa

SEQ ID NO: 20653 - DNA, 22 bp, Artificial Sequence
  Description of Artificial Sequence: Synthetic primer
ggcgaccagttgagacattttg

SEQ ID NO: 20654 - DNA, 28 bp, Artificial Sequence
  Description of Artificial Sequence: Synthetic primer
attagaagtgactgtattagaggaagcc

SEQ ID NO: 20655 - DNA, 22 bp, Artificial Sequence
  Description of Artificial Sequence: Synthetic primer
agcaacatgagtcacagaaggt

SEQ ID NO: 20656 - DNA, 24 bp, Artificial Sequence
  Description of Artificial Sequence: Synthetic primer
catcaacttgcccatctacaatgc

SEQ ID NO: 20657 - DNA, 27 bp, Artificial Sequence
  Description of Artificial Sequence: Synthetic primer
agcaacaaacttgggaagaaagtaatt

SEQ ID NO: 20658 - DNA, 24 bp, Artificial Sequence
  Description of Artificial Sequence: Synthetic primer
cgtacctcaactgctgatacagaa

SEQ ID NO: 20659 - DNA, 25 bp, Artificial Sequence
  Description of Artificial Sequence: Synthetic primer
ccagcatgaatctcatctgagtttg

SEQ ID NO: 20660 - DNA, 22 bp, Artificial Sequence
  Description of Artificial Sequence: Synthetic primer
gcgtaccggacagttaacctag

SEQ ID NO: 20661 - DNA, 21 bp, Artificial Sequence
  Description of Artificial Sequence: Synthetic primer
gctcctggttcgccatatgtt

SEQ ID NO: 20662 - DNA, 23 bp, Artificial Sequence
  Description of Artificial Sequence: Synthetic primer
gcgtggtatacgtacgtctactt

SEQ ID NO: 20663 - DNA, 28 bp, Artificial Sequence
  Description of Artificial Sequence: Synthetic primer
ttggtgatgttttcaggatcatactact

SEQ ID NO: 20664 - DNA, 23 bp, Artificial Sequence
  Description of Artificial Sequence: Synthetic primer
cgttgtagatcacgtcgtagagc

SEQ ID NO: 20665 - DNA, 24 bp, Artificial Sequence
  Description of Artificial Sequence: Synthetic primer
tttgctctgtagtctgcgactatt

SEQ ID NO: 20666 - DNA, 22 bp, Artificial Sequence
  Description of Artificial Sequence: Synthetic primer
tgcatgatcagatgccatctgt

SEQ ID NO: 20667 - DNA, 21 bp, Artificial Sequence
  Description of Artificial Sequence: Synthetic primer
aagccaaaaggtgcatctcac

SEQ ID NO: 20668 - DNA, 22 bp, Artificial Sequence
  Description of Artificial Sequence: Synthetic primer
ggccagcagtatgtcaggtatt

SEQ ID NO: 20669 - DNA, 25 bp, Artificial Sequence
  Description of Artificial Sequence: Synthetic primer
gctcaaaattacagggtcaaatggt

SEQ ID NO: 20670 - DNA, 26 bp, Artificial Sequence
  Description of Artificial Sequence: Synthetic primer
aaatgaatgtatgattccagcgttgt

SEQ ID NO: 20671 - DNA, 28 bp, Artificial Sequence
  Description of Artificial Sequence: Synthetic primer
tccaacaatctgctcaaaacaagaaaat

SEQ ID NO: 20672 - DNA, 24 bp, Artificial Sequence
  Description of Artificial Sequence: Synthetic primer
agaatgtgaatgtaagggcagctc

SEQ ID NO: 20673 - DNA, 21 bp, Artificial Sequence
  Description of Artificial Sequence: Synthetic primer
cttcagccctttcacgacctc

SEQ ID NO: 20674 - DNA, 26 bp, Artificial Sequence
  Description of Artificial Sequence: Synthetic primer
tcctctggagttctgttagatctgaa

SEQ ID NO: 20675 - DNA, 19 bp, Artificial Sequence
  Description of Artificial Sequence: Synthetic primer
gcgaaggcgagtagaggtg

SEQ ID NO: 20676 - DNA, 25 bp, Artificial Sequence
  Description of Artificial Sequence: Synthetic primer
aattgagcaagtttctcctgaacag

SEQ ID NO: 20677 - DNA, 23 bp, Artificial Sequence
  Description of Artificial Sequence: Synthetic primer
tccttgatcccaaaagagttggt

SEQ ID NO: 20678 - DNA, 21 bp, Artificial Sequence
  Description of Artificial Sequence: Synthetic primer
cagtcctcacacagctggaaa

SEQ ID NO: 20679 - DNA, 27 bp, Artificial Sequence
  Description of Artificial Sequence: Synthetic primer
gctattctggtaactaatgttcacagc

SEQ ID NO: 20680 - DNA, 22 bp, Artificial Sequence
  Description of Artificial Sequence: Synthetic primer
cgatggatccagtgcagattca

SEQ ID NO: 20681 - DNA, 27 bp, Artificial Sequence
  Description of Artificial Sequence: Synthetic primer
tcgctggtttctgtcacaaatataact

SEQ ID NO: 20682 - DNA, 22 bp, Artificial Sequence
  Description of Artificial Sequence: Synthetic primer
ctatcctctcacaaggcgtgat

SEQ ID NO: 20683 - DNA, 27 bp, Artificial Sequence
  Description of Artificial Sequence: Synthetic primer
gctgaagtgattactctcatgagaaca

SEQ ID NO: 20684 - DNA, 26 bp, Artificial Sequence
  Description of Artificial Sequence: Synthetic primer
cctatgcattatttccaacagtggtt

SEQ ID NO: 20685 - DNA, 21 bp, Artificial Sequence
  Description of Artificial Sequence: Synthetic primer
accaggttggcgaaatttcag

SEQ ID NO: 20686 - DNA, 24 bp, Artificial Sequence
  Description of Artificial Sequence: Synthetic primer
aaaagcagagtgggtgtaaaactg

SEQ ID NO: 20687 - DNA, 26 bp, Artificial Sequence
  Description of Artificial Sequence: Synthetic primer
gtcatctatctgggtgtggaattcat

SEQ ID NO: 20688 - DNA, 24 bp, Artificial Sequence
  Description of Artificial Sequence: Synthetic primer
ggccaatcaaatttgtcccaactg

SEQ ID NO: 20689 - DNA, 25 bp, Artificial Sequence
  Description of Artificial Sequence: Synthetic primer
tcctttgtccatcaaaccatcttga

SEQ ID NO: 20690 - DNA, 28 bp, Artificial Sequence
  Description of Artificial Sequence: Synthetic primer
tttctggaaactaactgtattactccgt

SEQ ID NO: 20691 - DNA, 28 bp, Artificial Sequence
  Description of Artificial Sequence: Synthetic primer
caagtcttagaaaactttggttgcatga

SEQ ID NO: 20692 - DNA, 26 bp, Artificial Sequence
  Description of Artificial Sequence: Synthetic primer
caggttgtcaattacatgtgctccta

SEQ ID NO: 20693 - DNA, 28 bp, Artificial Sequence
  Description of Artificial Sequence: Synthetic primer
aaatcaccaaagcattaggaatcacaat

SEQ ID NO: 20694 - DNA, 28 bp, Artificial Sequence
  Description of Artificial Sequence: Synthetic primer
tccctagcaatataacttccaagtttgt

SEQ ID NO: 20695 - DNA, 23 bp, Artificial Sequence
  Description of Artificial Sequence: Synthetic primer
ttcctcgtagaaaattgccctct

SEQ ID NO: 20696 - DNA, 26 bp, Artificial Sequence
  Description of Artificial Sequence: Synthetic primer
tcaatggaaatgtgatctgaacttgc

SEQ ID NO: 20697 - DNA, 23 bp, Artificial Sequence
  Description of Artificial Sequence: Synthetic primer
ccaacacgagttgttccttttca

SEQ ID NO: 20698 - DNA, 25 bp, Artificial Sequence
  Description of Artificial Sequence: Synthetic primer
cagaatcatcaacaaggaggacaac

SEQ ID NO: 20699 - DNA, 21 bp, Artificial Sequence
  Description of Artificial Sequence: Synthetic primer
gatccgtacgctccttgactt

SEQ ID NO: 20700 - DNA, 21 bp, Artificial Sequence
  Description of Artificial Sequence: Synthetic primer
agggatatccagacgaaagcc

SEQ ID NO: 20701 - DNA, 23 bp, Artificial Sequence
  Description of Artificial Sequence: Synthetic primer
ggaatcccctaacatgctctgaa

SEQ ID NO: 20702 - DNA, 21 bp, Artificial Sequence
  Description of Artificial Sequence: Synthetic primer
gctgagcccagagtatcacaa

SEQ ID NO: 20703 - DNA, 23 bp, Artificial Sequence
  Description of Artificial Sequence: Synthetic primer
caaccatgtagacaaacagccaa

SEQ ID NO: 20704 - DNA, 25 bp, Artificial Sequence
  Description of Artificial Sequence: Synthetic primer
aatggctatcctacaacagcctatc

SEQ ID NO: 20705 - DNA, 21 bp, Artificial Sequence
  Description of Artificial Sequence: Synthetic primer
ggatgtccttgctctcggatc

SEQ ID NO: 20706 - DNA, 27 bp, Artificial Sequence
  Description of Artificial Sequence: Synthetic primer
gctgaacctgcaaatcaaattactgtg

SEQ ID NO: 20707 - DNA, 21 bp, Artificial Sequence
  Description of Artificial Sequence: Synthetic primer
caaacctgcaaaatgggtgga

SEQ ID NO: 20708 - DNA, 21 bp, Artificial Sequence
  Description of Artificial Sequence: Synthetic primer
cttttgctaacgcggctttcc

SEQ ID NO: 20709 - DNA, 21 bp, Artificial Sequence
  Description of Artificial Sequence: Synthetic primer
gtggcagaaaggtgtgaacag

SEQ ID NO: 20710 - DNA, 24 bp, Artificial Sequence
  Description of Artificial Sequence: Synthetic primer
cggttgcagaaaacttgttgatga

SEQ ID NO: 20711 - DNA, 18 bp, Artificial Sequence
  Description of Artificial Sequence: Synthetic primer
ccacgcgtccccttcatc

SEQ ID NO: 20712 - DNA, 26 bp, Artificial Sequence
  Description of Artificial Sequence: Synthetic primer
ccatgaccgagatcaataaacaaaca

SEQ ID NO: 20713 - DNA, 28 bp, Artificial Sequence
  Description of Artificial Sequence: Synthetic primer
agtcaaaacaggacagatgtctaacttt

SEQ ID NO: 20714 - DNA, 25 bp, Artificial Sequence
  Description of Artificial Sequence: Synthetic primer
ccttgctatatgcagcaatcaaagc

SEQ ID NO: 20715 - DNA, 21 bp, Artificial Sequence
  Description of Artificial Sequence: Synthetic primer
gtacagccgtacaggcagatc

SEQ ID NO: 20716 - DNA, 24 bp, Artificial Sequence
  Description of Artificial Sequence: Synthetic primer
tgtgtcattgttgtccgaaaagac

SEQ ID NO: 20717 - DNA, 27 bp, Artificial Sequence
  Description of Artificial Sequence: Synthetic primer
acaatgctagagagggagttattgatg

SEQ ID NO: 20718 - DNA, 22 bp, Artificial Sequence
  Description of Artificial Sequence: Synthetic primer
gcaccacctcttcttcggtatc

SEQ ID NO: 20719 - DNA, 28 bp, Artificial Sequence
  Description of Artificial Sequence: Synthetic primer
gcagttgctctgagtagtactttaactt

SEQ ID NO: 20720 - DNA, 21 bp, Artificial Sequence
  Description of Artificial Sequence: Synthetic primer
cttgcccctttgctcacattc

SEQ ID NO: 20721 - DNA, 24 bp, Artificial Sequence
  Description of Artificial Sequence: Synthetic primer
cctagcagcagtaaaaacagaagc

SEQ ID NO: 20722 - DNA, 27 bp, Artificial Sequence
  Description of Artificial Sequence: Synthetic primer
ctctctatttttgccagcttcttgatt

SEQ ID NO: 20723 - DNA, 21 bp, Artificial Sequence
  Description of Artificial Sequence: Synthetic primer
aatgtcttcaggcgtgaccag

SEQ ID NO: 20724 - DNA, 28 bp, Artificial Sequence
  Description of Artificial Sequence: Synthetic primer
tcaagcaagttataactgaacattccga

SEQ ID NO: 20725 - DNA, 21 bp, Artificial Sequence
  Description of Artificial Sequence: Synthetic primer
ccctccttaccaatcgccaaa

SEQ ID NO: 20726 - DNA, 21 bp, Artificial Sequence
  Description of Artificial Sequence: Synthetic primer
ttcagtgcagggatacagacc

SEQ ID NO: 20727 - DNA, 21 bp, Artificial Sequence
  Description of Artificial Sequence: Synthetic primer
gcgagtagccaccataggatg

SEQ ID NO: 20728 - DNA, 27 bp, Artificial Sequence
  Description of Artificial Sequence: Synthetic primer
ccggaacagtagattttgactagaact

SEQ ID NO: 20729 - DNA, 21 bp, Artificial Sequence
  Description of Artificial Sequence: Synthetic primer
gagtgtagcggaccgaagtac

SEQ ID NO: 20730 - DNA, 21 bp, Artificial Sequence
  Description of Artificial Sequence: Synthetic primer
acagcacccacgttactgatt

SEQ ID NO: 20731 - DNA, 28 bp, Artificial Sequence
  Description of Artificial Sequence: Synthetic primer
gcaaattgtatgagacttcacaagaaga

SEQ ID NO: 20732 - DNA, 27 bp, Artificial Sequence
  Description of Artificial Sequence: Synthetic primer
tccaaaacagctatagcagagctaaat

SEQ ID NO: 20733 - DNA, 21 bp, Artificial Sequence
  Description of Artificial Sequence: Synthetic primer
tgttccatcgctgtggtaagg

SEQ ID NO: 20734 - DNA, 23 bp, Artificial Sequence
  Description of Artificial Sequence: Synthetic primer
acatccaaacaaactcaccagga

SEQ ID NO: 20735 - DNA, 25 bp, Artificial Sequence
  Description of Artificial Sequence: Synthetic primer
agccacttgcattgataaacagatg

SEQ ID NO: 20736 - DNA, 21 bp, Artificial Sequence
  Description of Artificial Sequence: Synthetic primer
ccgagtccgacacggataatc

SEQ ID NO: 20737 - DNA, 24 bp, Artificial Sequence
  Description of Artificial Sequence: Synthetic primer
gactaggttgcagctgagagatac

SEQ ID NO: 20738 - DNA, 19 bp, Artificial Sequence
  Description of Artificial Sequence: Synthetic primer
ggtcactgctcagctcagg

SEQ ID NO: 20739 - DNA, 19 bp, Artificial Sequence
  Description of Artificial Sequence: Synthetic primer
ccgggctgcttgagcttta

SEQ ID NO: 20740 - DNA, 28 bp, Artificial Sequence
  Description of Artificial Sequence: Synthetic primer
gtgcttttacagtgcaaatgtatacagt

SEQ ID NO: 20741 - DNA, 28 bp, Artificial Sequence
  Description of Artificial Sequence: Synthetic primer
tgtggataattttatactgccagtcaca

SEQ ID NO: 20742 - DNA, 21 bp, Artificial Sequence
  Description of Artificial Sequence: Synthetic primer
tctttaccgccatgtggtctg

SEQ ID NO: 20743 - DNA, 25 bp, Artificial Sequence
  Description of Artificial Sequence: Synthetic primer
tgttatcttgtttctccgcgatact

SEQ ID NO: 20744 - DNA, 27 bp, Artificial Sequence
  Description of Artificial Sequence: Synthetic primer
aaaaggttcataaaccgtatgcttctc

SEQ ID NO: 20745 - DNA, 28 bp, Artificial Sequence
  Description of Artificial Sequence: Synthetic primer
aggtcaaatttcctcttctctaatgtgg

SEQ ID NO: 20746 - DNA, 22 bp, Artificial Sequence
  Description of Artificial Sequence: Synthetic primer
tgagtgccattatggccatcaa

SEQ ID NO: 20747 - DNA, 25 bp, Artificial Sequence
  Description of Artificial Sequence: Synthetic primer
cttcttccgactagcaagagatgtt

SEQ ID NO: 20748 - DNA, 28 bp, Artificial Sequence
  Description of Artificial Sequence: Synthetic primer
tcttggtttgcggaaatttaattacctt

SEQ ID NO: 20749 - DNA, 27 bp, Artificial Sequence
  Description of Artificial Sequence: Synthetic primer
gcagtacgtcaagaaagctaattcatc

SEQ ID NO: 20750 - DNA, 26 bp, Artificial Sequence
  Description of Artificial Sequence: Synthetic primer
cctctttccttatcacgtagtcttgc

SEQ ID NO: 20751 - DNA, 23 bp, Artificial Sequence
  Description of Artificial Sequence: Synthetic primer
accgtggtgtgagttgacataac

SEQ ID NO: 20752 - DNA, 27 bp, Artificial Sequence
  Description of Artificial Sequence: Synthetic primer
tgactttgatgacgaccataaacatga

SEQ ID NO: 20753 - DNA, 27 bp, Artificial Sequence
  Description of Artificial Sequence: Synthetic primer
caaattccaatgaaagggtatatgcca

SEQ ID NO: 20754 - DNA, 24 bp, Artificial Sequence
  Description of Artificial Sequence: Synthetic primer
agtcgtctctagttttgctgaacc

SEQ ID NO: 20755 - DNA, 23 bp, Artificial Sequence
  Description of Artificial Sequence: Synthetic primer
tgtactcctgccatgtaaagctc

SEQ ID NO: 20756 - DNA, 21 bp, Artificial Sequence
  Description of Artificial Sequence: Synthetic primer
cccgggataagaacctggatg

SEQ ID NO: 20757 - DNA, 23 bp, Artificial Sequence
  Description of Artificial Sequence: Synthetic primer
gatatcagggctaccaagcaagt

SEQ ID NO: 20758 - DNA, 24 bp, Artificial Sequence
  Description of Artificial Sequence: Synthetic primer
gctatcatctttagcctgtgcaga

SEQ ID NO: 20759 - DNA, 22 bp, Artificial Sequence
  Description of Artificial Sequence: Synthetic primer
tacattccgtgcatgtggtagc

SEQ ID NO: 20760 - DNA, 27 bp, Artificial Sequence
  Description of Artificial Sequence: Synthetic primer
ggatcggttggtaattgatgtagatgt

SEQ ID NO: 20761 - DNA, 21 bp, Artificial Sequence
  Description of Artificial Sequence: Synthetic primer
caggaatcccccactcttctg

SEQ ID NO: 20762 - DNA, 27 bp, Artificial Sequence
  Description of Artificial Sequence: Synthetic primer
ggaggaagtaacatcttataccatggg

SEQ ID NO: 20763 - DNA, 27 bp, Artificial Sequence
  Description of Artificial Sequence: Synthetic primer
gctttggaaagaatgtaccccattaaa

SEQ ID NO: 20764 - DNA, 27 bp, Artificial Sequence
  Description of Artificial Sequence: Synthetic primer
ggctattttctgctgacaagtatcaga

SEQ ID NO: 20765 - DNA, 21 bp, Artificial Sequence
  Description of Artificial Sequence: Synthetic primer
gatcagagatgcacgcctgac

SEQ ID NO: 20766 - DNA, 24 bp, Artificial Sequence
  Description of Artificial Sequence: Synthetic primer
tgtggtagtcttcatcaactccag

SEQ ID NO: 20767 - DNA, 26 bp, Artificial Sequence
  Description of Artificial Sequence: Synthetic primer
ccatcttttatcccatgtgtcagtca

SEQ ID NO: 20768 - DNA, 28 bp, Artificial Sequence
  Description of Artificial Sequence: Synthetic primer
tgaaactgaaatctgtgattgtgatgtg

SEQ ID NO: 20769 - DNA, 21 bp, Artificial Sequence
  Description of Artificial Sequence: Synthetic primer
agaagcagaagcacgttctct

SEQ ID NO: 20770 - DNA, 24 bp, Artificial Sequence
  Description of Artificial Sequence: Synthetic primer
tgctgcatgctcacttatactagc

SEQ ID NO: 20771 - DNA, 26 bp, Artificial Sequence
  Description of Artificial Sequence: Synthetic primer
gttttgatttcaagtatggctttcgc

SEQ ID NO: 20772 - DNA, 28 bp, Artificial Sequence
  Description of Artificial Sequence: Synthetic primer
ttcaatatcaatagcaactacagcgaac

SEQ ID NO: 20773 - DNA, 28 bp, Artificial Sequence
  Description of Artificial Sequence: Synthetic primer
agagatcttgagaaatccattgctttgt

SEQ ID NO: 20774 - DNA, 21 bp, Artificial Sequence
  Description of Artificial Sequence: Synthetic primer
cacacaacatcccgtgctact

SEQ ID NO: 20775 - DNA, 21 bp, Artificial Sequence
  Description of Artificial Sequence: Synthetic primer
gtatccagacaaccggatgct

SEQ ID NO: 20776 - DNA, 23 bp, Artificial Sequence
  Description of Artificial Sequence: Synthetic primer
cacgaacagcttctcatccttct

SEQ ID NO: 20777 - DNA, 25 bp, Artificial Sequence
  Description of Artificial Sequence: Synthetic primer
ggtgcaccagaaattctttgaacat

SEQ ID NO: 20778 - DNA, 23 bp, Artificial Sequence
  Description of Artificial Sequence: Synthetic primer
ggcatgtatcaagcaccttggta

SEQ ID NO: 20779 - DNA, 25 bp, Artificial Sequence
  Description of Artificial Sequence: Synthetic primer
tgcacaaatagttgattcgctaacc

SEQ ID NO: 20780 - DNA, 28 bp, Artificial Sequence
  Description of Artificial Sequence: Synthetic primer
ccctattgtacacctcagttctttttca

SEQ ID NO: 20781 - DNA, 27 bp, Artificial Sequence
  Description of Artificial Sequence: Synthetic primer
gtttttctatcaatgcagtgtgctgaa

SEQ ID NO: 20782 - DNA, 21 bp, Artificial Sequence
  Description of Artificial Sequence: Synthetic primer
gttcaccatttgccacagtga

SEQ ID NO: 20783 - DNA, 22 bp, Artificial Sequence
  Description of Artificial Sequence: Synthetic primer
tgatgagcctgatgaagagtcg

SEQ ID NO: 20784 - DNA, 21 bp, Artificial Sequence
  Description of Artificial Sequence: Synthetic primer
ggtgaccagttgtgggttgta

SEQ ID NO: 20785 - DNA, 24 bp, Artificial Sequence
  Description of Artificial Sequence: Synthetic primer
aggtagtcctcctctagtcattgc

SEQ ID NO: 20786 - DNA, 26 bp, Artificial Sequence
  Description of Artificial Sequence: Synthetic primer
acatctttctcatggttaccaggtac

SEQ ID NO: 20787 - DNA, 23 bp, Artificial Sequence
  Description of Artificial Sequence: Synthetic primer
gaatgggcagatggtacatcaga

SEQ ID NO: 20788 - DNA, 27 bp, Artificial Sequence
  Description of Artificial Sequence: Synthetic primer
gtgaacctactttctttcaacaagcat

SEQ ID NO: 20789 - DNA, 22 bp, Artificial Sequence
  Description of Artificial Sequence: Synthetic primer
ccatgggaattatcagcccaca

SEQ ID NO: 20790 - DNA, 28 bp, Artificial Sequence
  Description of Artificial Sequence: Synthetic primer
gtaacactgtgactggtaattcaacatc

SEQ ID NO: 20791 - DNA, 27 bp, Artificial Sequence
  Description of Artificial Sequence: Synthetic primer
tctgagatgtcatactatttccagcca

SEQ ID NO: 20792 - DNA, 27 bp, Artificial Sequence
  Description of Artificial Sequence: Synthetic primer
cccttgttttatcgtcctaatgtttgt

SEQ ID NO: 20793 - DNA, 21 bp, Artificial Sequence
  Description of Artificial Sequence: Synthetic primer
agcgaagggccaatagaggta

SEQ ID NO: 20794 - DNA, 24 bp, Artificial Sequence
  Description of Artificial Sequence: Synthetic primer
gcatgtaaaccacctcgttaggta

SEQ ID NO: 20795 - DNA, 26 bp, Artificial Sequence
  Description of Artificial Sequence: Synthetic primer
tgggtaaagttgtccacataacatga

SEQ ID NO: 20796 - DNA, 25 bp, Artificial Sequence
  Description of Artificial Sequence: Synthetic primer
acttatttcgcacaaaggaacatcc

SEQ ID NO: 20797 - DNA, 21 bp, Artificial Sequence
  Description of Artificial Sequence: Synthetic primer
tgggtcggtacctccttatca

SEQ ID NO: 20798 - DNA, 22 bp, Artificial Sequence
  Description of Artificial Sequence: Synthetic primer
cagtgcaaatagttggcgagac

SEQ ID NO: 20799 - DNA, 28 bp, Artificial Sequence
  Description of Artificial Sequence: Synthetic primer
tgcaagtttgcttcttctactatggtta

SEQ ID NO: 20800 - DNA, 26 bp, Artificial Sequence
  Description of Artificial Sequence: Synthetic primer
ggaatttcccagagagagaatgtagc

SEQ ID NO: 20801 - DNA, 28 bp, Artificial Sequence
  Description of Artificial Sequence: Synthetic primer
atgtagatacctggtgaaattactcctg

SEQ ID NO: 20802 - DNA, 23 bp, Artificial Sequence
  Description of Artificial Sequence: Synthetic primer
cctcttcagcaaacgctacgata

SEQ ID NO: 20803 - DNA, 22 bp, Artificial Sequence
  Description of Artificial Sequence: Synthetic primer
actggccgtagtatcaaacaca

SEQ ID NO: 20804 - DNA, 21 bp, Artificial Sequence
  Description of Artificial Sequence: Synthetic primer
aatggcatgcacgctcatact

SEQ ID NO: 20805 - DNA, 25 bp, Artificial Sequence
  Description of Artificial Sequence: Synthetic primer
tttttgctgaacttaaggagatggc

SEQ ID NO: 20806 - DNA, 26 bp, Artificial Sequence
  Description of Artificial Sequence: Synthetic primer
cagaacctgcaagaacagattatcag

SEQ ID NO: 20807 - DNA, 21 bp, Artificial Sequence
  Description of Artificial Sequence: Synthetic primer
ccgctagttaggttcgcttca

SEQ ID NO: 20808 - DNA, 26 bp, Artificial Sequence
  Description of Artificial Sequence: Synthetic primer
gctatgtgaatcttacttgtgcaagc

SEQ ID NO: 20809 - DNA, 24 bp, Artificial Sequence
  Description of Artificial Sequence: Synthetic primer
tcaacataccagctgtgaagtgat

SEQ ID NO: 20810 - DNA, 27 bp, Artificial Sequence
  Description of Artificial Sequence: Synthetic primer
tgtataaacagttgcatgttgcagatt

SEQ ID NO: 20811 - DNA, 25 bp, Artificial Sequence
  Description of Artificial Sequence: Synthetic primer
aggcttacacattctgttgatgaca

SEQ ID NO: 20812 - DNA, 23 bp, Artificial Sequence
  Description of Artificial Sequence: Synthetic primer
tgtactgtgcatgatttgtgagc

SEQ ID NO: 20813 - DNA, 24 bp, Artificial Sequence
  Description of Artificial Sequence: Synthetic primer
tttcagcaacgacctattactcca

SEQ ID NO: 20814 - DNA, 28 bp, Artificial Sequence
  Description of Artificial Sequence: Synthetic primer
atactcactaatctttcagcacacaaca

SEQ ID NO: 20815 - DNA, 28 bp, Artificial Sequence
  Description of Artificial Sequence: Synthetic primer
ttctgttgtcctcttattgtcttctcat

SEQ ID NO: 20816 - DNA, 21 bp, Artificial Sequence
  Description of Artificial Sequence: Synthetic primer
ctggcttgtacatcgccaaag

SEQ ID NO: 20817 - DNA, 24 bp, Artificial Sequence
  Description of Artificial Sequence: Synthetic primer
gcaagttcggaaaattatgcaggt

SEQ ID NO: 20818 - DNA, 21 bp, Artificial Sequence
  Description of Artificial Sequence: Synthetic primer
ctgctgagcagaatgctgcta

SEQ ID NO: 20819 - DNA, 22 bp, Artificial Sequence
  Description of Artificial Sequence: Synthetic primer
aagaacttgcatttggctggag

SEQ ID NO: 20820 - DNA, 21 bp, Artificial Sequence
  Description of Artificial Sequence: Synthetic primer
gctcaacttttccggccattt

SEQ ID NO: 20821 - DNA, 24 bp, Artificial Sequence
  Description of Artificial Sequence: Synthetic primer
gttggcatacagtcaaagctacag

SEQ ID NO: 20822 - DNA, 22 bp, Artificial Sequence
  Description of Artificial Sequence: Synthetic primer
acacaaatcaggcaaactgcaa

SEQ ID NO: 20823 - DNA, 21 bp, Artificial Sequence
  Description of Artificial Sequence: Synthetic primer
acagacctgctgaaccagaag

SEQ ID NO: 20824 - DNA, 24 bp, Artificial Sequence
  Description of Artificial Sequence: Synthetic primer
cctgcatcatctgcattagatgga

SEQ ID NO: 20825 - DNA, 23 bp, Artificial Sequence
  Description of Artificial Sequence: Synthetic primer
ggacgtatagcagactaccgagt

SEQ ID NO: 20826 - DNA, 21 bp, Artificial Sequence
  Description of Artificial Sequence: Synthetic primer
gtaagccggctactctccttt

SEQ ID NO: 20827 - DNA, 27 bp, Artificial Sequence
  Description of Artificial Sequence: Synthetic primer
ccaggagaaaagagatgatctctgaag

SEQ ID NO: 20828 - DNA, 22 bp, Artificial Sequence
  Description of Artificial Sequence: Synthetic primer
ttcagactgactcggtctcatg

SEQ ID NO: 20829 - DNA, 21 bp, Artificial Sequence
  Description of Artificial Sequence: Synthetic primer
gagcaaggctacgaacctcag

SEQ ID NO: 20830 - DNA, 21 bp, Artificial Sequence
  Description of Artificial Sequence: Synthetic primer
gtggcctgttccagtcatctt

SEQ ID NO: 20831 - DNA, 21 bp, Artificial Sequence
  Description of Artificial Sequence: Synthetic primer
ttgcctgtgcatctgcttctt

SEQ ID NO: 20832 - DNA, 27 bp, Artificial Sequence
  Description of Artificial Sequence: Synthetic primer
accaatagatgacattgaaatggcaaa

SEQ ID NO: 20833 - DNA, 25 bp, Artificial Sequence
  Description of Artificial Sequence: Synthetic primer
tgtattctgcatcgcatgaagatgt

SEQ ID NO: 20834 - DNA, 21 bp, Artificial Sequence
  Description of Artificial Sequence: Synthetic primer
agggttccaagcttccaacaa

SEQ ID NO: 20835 - DNA, 28 bp, Artificial Sequence
  Description of Artificial Sequence: Synthetic primer
atttggctaatcagaatccatggaaaga

SEQ ID NO: 20836 - DNA, 25 bp, Artificial Sequence
  Description of Artificial Sequence: Synthetic primer
aagcgtataacttgcctgttctagt

SEQ ID NO: 20837 - DNA, 21 bp, Artificial Sequence
  Description of Artificial Sequence: Synthetic primer
atctctgccaccaccacaaac

SEQ ID NO: 20838 - DNA, 28 bp, Artificial Sequence
  Description of Artificial Sequence: Synthetic primer
gtgaatattctgttccactatgcatagc

SEQ ID NO: 20839 - DNA, 26 bp, Artificial Sequence
  Description of Artificial Sequence: Synthetic primer
gtcattgtttggatttgaggacttgt

SEQ ID NO: 20840 - DNA, 21 bp, Artificial Sequence
  Description of Artificial Sequence: Synthetic primer
attacgcagatcctcccgcta

SEQ ID NO: 20841 - DNA, 24 bp, Artificial Sequence
  Description of Artificial Sequence: Synthetic primer
aaacagacggaccaaaatatgtgg

SEQ ID NO: 20842 - DNA, 24 bp, Artificial Sequence
  Description of Artificial Sequence: Synthetic primer
cacggtcctgagcaatataacact

SEQ ID NO: 20843 - DNA, 24 bp, Artificial Sequence
  Description of Artificial Sequence: Synthetic primer
gtgaattctgttgacttcgggaca

SEQ ID NO: 20844 - DNA, 28 bp, Artificial Sequence
  Description of Artificial Sequence: Synthetic primer
tctccttttcccaaaaactatgttcctt

SEQ ID NO: 20845 - DNA, 21 bp, Artificial Sequence
  Description of Artificial Sequence: Synthetic primer
tatccctgcggtgactgttga

SEQ ID NO: 20846 - DNA, 24 bp, Artificial Sequence
  Description of Artificial Sequence: Synthetic primer
gcaataagaacatcaggcagaacc

SEQ ID NO: 20847 - DNA, 22 bp, Artificial Sequence
  Description of Artificial Sequence: Synthetic primer
tgggttcgtaatgcgattaggg

SEQ ID NO: 20848 - DNA, 28 bp, Artificial Sequence
  Description of Artificial Sequence: Synthetic primer
gtgtccagatgcttatagaaggttaaca

SEQ ID NO: 20849 - DNA, 25 bp, Artificial Sequence
  Description of Artificial Sequence: Synthetic primer
gagatacatccatggcagaccatag

SEQ ID NO: 20850 - DNA, 21 bp, Artificial Sequence
  Description of Artificial Sequence: Synthetic primer
gacagagtgctggtagatgcg

SEQ ID NO: 20851 - DNA, 23 bp, Artificial Sequence
  Description of Artificial Sequence: Synthetic primer
ccaggaagcatgaatcaagcatt

SEQ ID NO: 20852 - DNA, 22 bp, Artificial Sequence
  Description of Artificial Sequence: Synthetic primer
tcttgacataatcacgcctcgt

SEQ ID NO: 20853 - DNA, 27 bp, Artificial Sequence
  Description of Artificial Sequence: Synthetic primer
caatgtttgcatccaatgtgaagaaac

SEQ ID NO: 20854 - DNA, 24 bp, Artificial Sequence
  Description of Artificial Sequence: Synthetic primer
agccataaaacaaatccacagcac

SEQ ID NO: 20855 - DNA, 25 bp, Artificial Sequence
  Description of Artificial Sequence: Synthetic primer
gcagataatagcagcataacagggt

SEQ ID NO: 20856 - DNA, 22 bp, Artificial Sequence
  Description of Artificial Sequence: Synthetic primer
aagaagtcgcattgcagctaac

SEQ ID NO: 20857 - DNA, 24 bp, Artificial Sequence
  Description of Artificial Sequence: Synthetic primer
tgaaggttctggtggaagttagtg

SEQ ID NO: 20858 - DNA, 21 bp, Artificial Sequence
  Description of Artificial Sequence: Synthetic primer
gtggaccagatcaaccttccg

SEQ ID NO: 20859 - DNA, 27 bp, Artificial Sequence
  Description of Artificial Sequence: Synthetic primer
tgcactcatgccaaaacatatatatgc

SEQ ID NO: 20860 - DNA, 26 bp, Artificial Sequence
  Description of Artificial Sequence: Synthetic primer
tcactctacatcttccattagcactc

SEQ ID NO: 20861 - DNA, 22 bp, Artificial Sequence
  Description of Artificial Sequence: Synthetic primer
caagctctccaatgtactgggt

SEQ ID NO: 20862 - DNA, 21 bp, Artificial Sequence
  Description of Artificial Sequence: Synthetic primer
ccgcagtcctacatgagacat

SEQ ID NO: 20863 - DNA, 21 bp, Artificial Sequence
  Description of Artificial Sequence: Synthetic primer
tgaggtcaacacgctgttgta

SEQ ID NO: 20864 - DNA, 21 bp, Artificial Sequence
  Description of Artificial Sequence: Synthetic primer
ctctctggtggctgcatcttt

SEQ ID NO: 20865 - DNA, 21 bp, Artificial Sequence
  Description of Artificial Sequence: Synthetic primer
ccgtactggcaagctatcctc

SEQ ID NO: 20866 - DNA, 24 bp, Artificial Sequence
  Description of Artificial Sequence: Synthetic primer
gaatggatttccggatgatggttg

SEQ ID NO: 20867 - DNA, 27 bp, Artificial Sequence
  Description of Artificial Sequence: Synthetic primer
gcgacatcgtattttgaaaaggaggta

SEQ ID NO: 20868 - DNA, 28 bp, Artificial Sequence
  Description of Artificial Sequence: Synthetic primer
actcccttaaattggtgtaccttttctt

SEQ ID NO: 20869 - DNA, 28 bp, Artificial Sequence
  Description of Artificial Sequence: Synthetic primer
actacctatctaaatcctctagcagcaa

SEQ ID NO: 20870 - DNA, 26 bp, Artificial Sequence
  Description of Artificial Sequence: Synthetic primer
ggatttactaatttgtagggctgcca

SEQ ID NO: 20871 - DNA, 27 bp, Artificial Sequence
  Description of Artificial Sequence: Synthetic primer
agaagtactatagtaccggcgataaca

SEQ ID NO: 20872 - DNA, 23 bp, Artificial Sequence
  Description of Artificial Sequence: Synthetic primer
tgaacatagtgccgctatagacc

SEQ ID NO: 20873 - DNA, 27 bp, Artificial Sequence
  Description of Artificial Sequence: Synthetic primer
ttgaaaattcactctcgttgagttgag

SEQ ID NO: 20874 - DNA, 24 bp, Artificial Sequence
  Description of Artificial Sequence: Synthetic primer
tgcacttacaatgtaccagcaact

SEQ ID NO: 20875 - DNA, 21 bp, Artificial Sequence
  Description of Artificial Sequence: Synthetic primer
cgtgcagctgtagtagaccat

SEQ ID NO: 20876 - DNA, 23 bp, Artificial Sequence
  Description of Artificial Sequence: Synthetic primer
gcttgcccaggttctataaatgg

SEQ ID NO: 20877 - DNA, 27 bp, Artificial Sequence
  Description of Artificial Sequence: Synthetic primer
gagggtccaacgatatttctgattaca

SEQ ID NO: 20878 - DNA, 28 bp, Artificial Sequence
  Description of Artificial Sequence: Synthetic primer
cccgaatttctctgttcataacactact

SEQ ID NO: 20879 - DNA, 28 bp, Artificial Sequence
  Description of Artificial Sequence: Synthetic primer
gctaccgatgaagtaaagaatgtttacc

SEQ ID NO: 20880 - DNA, 26 bp, Artificial Sequence
  Description of Artificial Sequence: Synthetic primer
ccaaagctttgggtatagtgattcct

SEQ ID NO: 20881 - DNA, 22 bp, Artificial Sequence
  Description of Artificial Sequence: Synthetic primer
gagtttaccaagcttgggcatg

SEQ ID NO: 20882 - DNA, 21 bp, Artificial Sequence
  Description of Artificial Sequence: Synthetic primer
agggatgttgtggcactacag

SEQ ID NO: 20883 - DNA, 21 bp, Artificial Sequence
  Description of Artificial Sequence: Synthetic primer
aacagctgggccagatcattc

SEQ ID NO: 20884 - DNA, 25 bp, Artificial Sequence
  Description of Artificial Sequence: Synthetic primer
agatcaaatgtgccttcagatggat

SEQ ID NO: 20885 - DNA, 25 bp, Artificial Sequence
  Description of Artificial Sequence: Synthetic primer
aaggatgtaaccagaagcaccaaaa

SEQ ID NO: 20886 - DNA, 28 bp, Artificial Sequence
  Description of Artificial Sequence: Synthetic primer
tccagacataaagaacatgcaagaatga

SEQ ID NO: 20887 - DNA, 24 bp, Artificial Sequence
  Description of Artificial Sequence: Synthetic primer
agtgcagcaattcaatagggaatg

SEQ ID NO: 20888 - DNA, 24 bp, Artificial Sequence
  Description of Artificial Sequence: Synthetic primer
cgtaggcagtgtattctgcatcag

SEQ ID NO: 20889 - DNA, 23 bp, Artificial Sequence
  Description of Artificial Sequence: Synthetic primer
agatggctcttcaagtttgcact

SEQ ID NO: 20890 - DNA, 25 bp, Artificial Sequence
  Description of Artificial Sequence: Synthetic primer
ccacttctattgtcattgtgcctca

SEQ ID NO: 20891 - DNA, 28 bp, Artificial Sequence
  Description of Artificial Sequence: Synthetic primer
gaaattttgttcttatggcaaacaagca

SEQ ID NO: 20892 - DNA, 28 bp, Artificial Sequence
  Description of Artificial Sequence: Synthetic primer
aagagtaatcagaaaacgcatcatcaga

SEQ ID NO: 20893 - DNA, 24 bp, Artificial Sequence
  Description of Artificial Sequence: Synthetic primer
cgaagatagttggtcactccttcc

SEQ ID NO: 20894 - DNA, 21 bp, Artificial Sequence
  Description of Artificial Sequence: Synthetic primer
ggttcggttccccatcttgaa

SEQ ID NO: 20895 - DNA, 23 bp, Artificial Sequence
  Description of Artificial Sequence: Synthetic primer
aggaaaattgcagtgaagtgtgg

SEQ ID NO: 20896 - DNA, 25 bp, Artificial Sequence
  Description of Artificial Sequence: Synthetic primer
tgcagcatctgtagatacaacttca

SEQ ID NO: 20897 - DNA, 23 bp, Artificial Sequence
  Description of Artificial Sequence: Synthetic primer
tcagtgaagtgtttcccagagtc

SEQ ID NO: 20898 - DNA, 21 bp, Artificial Sequence
  Description of Artificial Sequence: Synthetic primer
ctatggatggcatgctgttgc

SEQ ID NO: 20899 - DNA, 24 bp, Artificial Sequence
  Description of Artificial Sequence: Synthetic primer
ggaggatggcatgcagatatagag

SEQ ID NO: 20900 - DNA, 28 bp, Artificial Sequence
  Description of Artificial Sequence: Synthetic primer
taaatcggctaaacttgatggctatcag

SEQ ID NO: 20901 - DNA, 24 bp, Artificial Sequence
  Description of Artificial Sequence: Synthetic primer
actggcatgaacaaaagaaaaggc

SEQ ID NO: 20902 - DNA, 25 bp, Artificial Sequence
  Description of Artificial Sequence: Synthetic primer
tgtcacatgaatgtgtgaacctgat

SEQ ID NO: 20903 - DNA, 28 bp, Artificial Sequence
  Description of Artificial Sequence: Synthetic primer
atcaactccttatgttgttttaggttcg

SEQ ID NO: 20904 - DNA, 21 bp, Artificial Sequence
  Description of Artificial Sequence: Synthetic primer
cggtccctgtctccattgatc

SEQ ID NO: 20905 - DNA, 24 bp, Artificial Sequence
  Description of Artificial Sequence: Synthetic primer
aagagaagaccttcacgtggtatg

SEQ ID NO: 20906 - DNA, 28 bp, Artificial Sequence
  Description of Artificial Sequence: Synthetic primer
gtgtccatgtctccttgttaatttatgc

SEQ ID NO: 20907 - DNA, 24 bp, Artificial Sequence
  Description of Artificial Sequence: Synthetic primer
tgggtgtggatactgtagagaaga

SEQ ID NO: 20908 - DNA, 21 bp, Artificial Sequence
  Description of Artificial Sequence: Synthetic primer
caacaaccgtggagaggatgg

SEQ ID NO: 20909 - DNA, 21 bp, Artificial Sequence
  Description of Artificial Sequence: Synthetic primer
tttcatttcgcagccagtcgt

SEQ ID NO: 20910 - DNA, 21 bp, Artificial Sequence
  Description of Artificial Sequence: Synthetic primer
gtgcctcacgaatgtgcattt

SEQ ID NO: 20911 - DNA, 21 bp, Artificial Sequence
  Description of Artificial Sequence: Synthetic primer
cggagagctcatgagtgttga

SEQ ID NO: 20912 - DNA, 21 bp, Artificial Sequence
  Description of Artificial Sequence: Synthetic primer
gaaggagttgggagcttcacc

SEQ ID NO: 20913 - DNA, 27 bp, Artificial Sequence
  Description of Artificial Sequence: Synthetic primer
gtattccttcatctatgtcaccatcca

SEQ ID NO: 20914 - DNA, 23 bp, Artificial Sequence
  Description of Artificial Sequence: Synthetic primer
aaggacagatgatccaagtgagc

SEQ ID NO: 20915 - DNA, 25 bp, Artificial Sequence
  Description of Artificial Sequence: Synthetic primer
gaatgctagttgttctcgtagcttc

SEQ ID NO: 20916 - DNA, 22 bp, Artificial Sequence
  Description of Artificial Sequence: Synthetic primer
tgctgcatccttgaattccaca

SEQ ID NO: 20917 - DNA, 25 bp, Artificial Sequence
  Description of Artificial Sequence: Synthetic primer
gggaaatatcaaacaaggcacagaa

SEQ ID NO: 20918 - DNA, 23 bp, Artificial Sequence
  Description of Artificial Sequence: Synthetic primer
gagcatctaatagagggcagctt

SEQ ID NO: 20919 - DNA, 23 bp, Artificial Sequence
  Description of Artificial Sequence: Synthetic primer
tgtcacaacatgccagcaatttt

SEQ ID NO: 20920 - DNA, 21 bp, Artificial Sequence
  Description of Artificial Sequence: Synthetic primer
ggagcaagtcctttctgcaac

SEQ ID NO: 20921 - DNA, 21 bp, Artificial Sequence
  Description of Artificial Sequence: Synthetic primer
gtcgctcactcatccggtatc

SEQ ID NO: 20922 - DNA, 25 bp, Artificial Sequence
  Description of Artificial Sequence: Synthetic primer
gggttggttgttggtatatttggtg

SEQ ID NO: 20923 - DNA, 22 bp, Artificial Sequence
  Description of Artificial Sequence: Synthetic primer
gtttgctgagagtgacagccta

SEQ ID NO: 20924 - DNA, 25 bp, Artificial Sequence
  Description of Artificial Sequence: Synthetic primer
tgctgtaccttgttgcatactcaaa

SEQ ID NO: 20925 - DNA, 21 bp, Artificial Sequence
  Description of Artificial Sequence: Synthetic primer
cagaccatggtctcctctgtg

SEQ ID NO: 20926 - DNA, 24 bp, Artificial Sequence
  Description of Artificial Sequence: Synthetic primer
gcatggagaatgagttggagaaga

SEQ ID NO: 20927 - DNA, 28 bp, Artificial Sequence
  Description of Artificial Sequence: Synthetic primer
caatctttttaatgctcactcctcactg

SEQ ID NO: 20928 - DNA, 22 bp, Artificial Sequence
  Description of Artificial Sequence: Synthetic primer
tccagtgcagactgtaatcctg

SEQ ID NO: 20929 - DNA, 25 bp, Artificial Sequence
  Description of Artificial Sequence: Synthetic primer
tctcatggaatgtatggtctctgtg

SEQ ID NO: 20930 - DNA, 22 bp, Artificial Sequence
  Description of Artificial Sequence: Synthetic primer
tttcatagcgtgctgggaatct

SEQ ID NO: 20931 - DNA, 22 bp, Artificial Sequence
  Description of Artificial Sequence: Synthetic primer
gacgatgttaccaccaaatgcc

SEQ ID NO: 20932 - DNA, 25 bp, Artificial Sequence
  Description of Artificial Sequence: Synthetic primer
cttctttcttcatcgcactctcatg

SEQ ID NO: 20933 - DNA, 27 bp, Artificial Sequence
  Description of Artificial Sequence: Synthetic primer
tggtatgtatctaggcattgtcaatca

SEQ ID NO: 20934 - DNA, 25 bp, Artificial Sequence
  Description of Artificial Sequence: Synthetic primer
gctctagtagctcttcaaaactcca

SEQ ID NO: 20935 - DNA, 21 bp, Artificial Sequence
  Description of Artificial Sequence: Synthetic primer
tgcggatccgctaggattttc

SEQ ID NO: 20936 - DNA, 28 bp, Artificial Sequence
  Description of Artificial Sequence: Synthetic primer
agatgtgtgtaattccaaagtacccaat

SEQ ID NO: 20937 - DNA, 19 bp, Artificial Sequence
  Description of Artificial Sequence: Synthetic primer
taccgtccgtgttgctctc

SEQ ID NO: 20938 - DNA, 25 bp, Artificial Sequence
  Description of Artificial Sequence: Synthetic primer
gggttgttgagtttaattagtgcgt

SEQ ID NO: 20939 - DNA, 21 bp, Artificial Sequence
  Description of Artificial Sequence: Synthetic primer
cagcacatgcatgaacgagag

SEQ ID NO: 20940 - DNA, 21 bp, Artificial Sequence
  Description of Artificial Sequence: Synthetic primer
atagctgatgcggctgagttt

SEQ ID NO: 20941 - DNA, 28 bp, Artificial Sequence
  Description of Artificial Sequence: Synthetic primer
gcgtgttcaaatttcaaatgttgcatag

SEQ ID NO: 20942 - DNA, 21 bp, Artificial Sequence
  Description of Artificial Sequence: Synthetic primer
ccacacagcgcatgttgattc

SEQ ID NO: 20943 - DNA, 22 bp, Artificial Sequence
  Description of Artificial Sequence: Synthetic primer
agctgggtctattcagaatgcc

SEQ ID NO: 20944 - DNA, 22 bp, Artificial Sequence
  Description of Artificial Sequence: Synthetic primer
tcagatgagacagcaacatccg

SEQ ID NO: 20945 - DNA, 23 bp, Artificial Sequence
  Description of Artificial Sequence: Synthetic primer
aactgtggtggaacaatttgcat

SEQ ID NO: 20946 - DNA, 28 bp, Artificial Sequence
  Description of Artificial Sequence: Synthetic primer
caaatatgaatgacttggactgaaggag

SEQ ID NO: 20947 - DNA, 27 bp, Artificial Sequence
  Description of Artificial Sequence: Synthetic primer
tcatgagacaaatttgactcactcact

SEQ ID NO: 20948 - DNA, 28 bp, Artificial Sequence
  Description of Artificial Sequence: Synthetic primer
cttaccctgtactctaacacaatcagtt

SEQ ID NO: 20949 - DNA, 28 bp, Artificial Sequence
  Description of Artificial Sequence: Synthetic primer
ctgagtttagtagcacatgatttgttcc

SEQ ID NO: 20950 - DNA, 21 bp, Artificial Sequence
  Description of Artificial Sequence: Synthetic primer
ccataacgacgaccatcagga

SEQ ID NO: 20951 - DNA, 23 bp, Artificial Sequence
  Description of Artificial Sequence: Synthetic primer
atagcacccaacaaggtaggaga

SEQ ID NO: 20952 - DNA, 26 bp, Artificial Sequence
  Description of Artificial Sequence: Synthetic primer
gcgatttggatcataatgttcttccg

SEQ ID NO: 20953 - DNA, 28 bp, Artificial Sequence
  Description of Artificial Sequence: Synthetic primer
cattttctatgcatcacactgctgaaat

SEQ ID NO: 20954 - DNA, 23 bp, Artificial Sequence
  Description of Artificial Sequence: Synthetic primer
tcttatacggcttgcagtacacc

SEQ ID NO: 20955 - DNA, 28 bp, Artificial Sequence
  Description of Artificial Sequence: Synthetic primer
agcacacataccatttttagtgtttgtt

SEQ ID NO: 20956 - DNA, 24 bp, Artificial Sequence
  Description of Artificial Sequence: Synthetic primer
gtgttttcaggaataggactccga

SEQ ID NO: 20957 - DNA, 22 bp, Artificial Sequence
  Description of Artificial Sequence: Synthetic primer
tctgtcagattgggcattcctc

SEQ ID NO: 20958 - DNA, 27 bp, Artificial Sequence
  Description of Artificial Sequence: Synthetic primer
ctggaagaacattttatgggcaaacat

SEQ ID NO: 20959 - DNA, 21 bp, Artificial Sequence
  Description of Artificial Sequence: Synthetic primer
cctgcgagtgctggaagatta

SEQ ID NO: 20960 - DNA, 26 bp, Artificial Sequence
  Description of Artificial Sequence: Synthetic primer
agtattaggtccacaggaagatcaac

SEQ ID NO: 20961 - DNA, 25 bp, Artificial Sequence
  Description of Artificial Sequence: Synthetic primer
cttgatgaattgcttgcagtccaaa

SEQ ID NO: 20962 - DNA, 27 bp, Artificial Sequence
  Description of Artificial Sequence: Synthetic primer
tccaggttttcagtgaagttttcttct

SEQ ID NO: 20963 - DNA, 27 bp, Artificial Sequence
  Description of Artificial Sequence: Synthetic primer
gatgtagtcaaggaataatccaccgat

SEQ ID NO: 20964 - DNA, 25 bp, Artificial Sequence
  Description of Artificial Sequence: Synthetic primer
gcccgtgtttttgtagattgttgat

SEQ ID NO: 20965 - DNA, 28 bp, Artificial Sequence
  Description of Artificial Sequence: Synthetic primer
gtcaacttgtcctaccatgtgttaagta

SEQ ID NO: 20966 - DNA, 21 bp, Artificial Sequence
  Description of Artificial Sequence: Synthetic primer
agtgtgtctcacgttggtagc

SEQ ID NO: 20967 - DNA, 23 bp, Artificial Sequence
  Description of Artificial Sequence: Synthetic primer
tgtgcaaggttttcctctcagtt

SEQ ID NO: 20968 - DNA, 28 bp, Artificial Sequence
  Description of Artificial Sequence: Synthetic primer
tgtagtgtctttgcattgtcaaaatctt

SEQ ID NO: 20969 - DNA, 21 bp, Artificial Sequence
  Description of Artificial Sequence: Synthetic primer
aaaaagcggaagcatggtgga

SEQ ID NO: 20970 - DNA, 26 bp, Artificial Sequence
  Description of Artificial Sequence: Synthetic primer
agcattctaacacctaagacaactgg

SEQ ID NO: 20971 - DNA, 21 bp, Artificial Sequence
  Description of Artificial Sequence: Synthetic primer
aatctgcaagaaagggcggtt

SEQ ID NO: 20972 - DNA, 24 bp, Artificial Sequence
  Description of Artificial Sequence: Synthetic primer
tcttcttgagtcctgggtatccat

SEQ ID NO: 20973 - DNA, 27 bp, Artificial Sequence
  Description of Artificial Sequence: Synthetic primer
catgaagcatacggttctacaatgaag

SEQ ID NO: 20974 - DNA, 22 bp, Artificial Sequence
  Description of Artificial Sequence: Synthetic primer
cgccgagatttcatcgttgaag

SEQ ID NO: 20975 - DNA, 21 bp, Artificial Sequence
  Description of Artificial Sequence: Synthetic primer
ccgagcagatggaattccagt

SEQ ID NO: 20976 - DNA, 22 bp, Artificial Sequence
  Description of Artificial Sequence: Synthetic primer
gcctttgatgtctactgctgga

SEQ ID NO: 20977 - DNA, 24 bp, Artificial Sequence
  Description of Artificial Sequence: Synthetic primer
acacgacagtatgtcatgttcaga

SEQ ID NO: 20978 - DNA, 19 bp, Artificial Sequence
  Description of Artificial Sequence: Synthetic primer
ttgccaggaggagttgcag

SEQ ID NO: 20979 - DNA, 21 bp, Artificial Sequence
  Description of Artificial Sequence: Synthetic primer
ctgaacgacatctgccaggac

SEQ ID NO: 20980 - DNA, 24 bp, Artificial Sequence
  Description of Artificial Sequence: Synthetic primer
gggacagtttcattgtggatcctg

SEQ ID NO: 20981 - DNA, 25 bp, Artificial Sequence
  Description of Artificial Sequence: Synthetic primer
tgctaaacgacattaacacatgtgc

SEQ ID NO: 20982 - DNA, 24 bp, Artificial Sequence
  Description of Artificial Sequence: Synthetic primer
cctctattgcgaacaatgctgaag

SEQ ID NO: 20983 - DNA, 21 bp, Artificial Sequence
  Description of Artificial Sequence: Synthetic primer
ttcatgcacatgctggaagtc

SEQ ID NO: 20984 - DNA, 24 bp, Artificial Sequence
  Description of Artificial Sequence: Synthetic primer
gagattgttcgtgcatggaagatg

SEQ ID NO: 20985 - DNA, 18 bp, Artificial Sequence
  Description of Artificial Sequence: Synthetic primer
cacctcgctgccgtcaag

SEQ ID NO: 20986 - DNA, 22 bp, Artificial Sequence
  Description of Artificial Sequence: Synthetic primer
acatcctgaactcccactctca

SEQ ID NO: 20987 - DNA, 21 bp, Artificial Sequence
  Description of Artificial Sequence: Synthetic primer
cgagagcctccaacgtagttc

SEQ ID NO: 20988 - DNA, 23 bp, Artificial Sequence
  Description of Artificial Sequence: Synthetic primer
gtactcccgaaacgatatgcaac

SEQ ID NO: 20989 - DNA, 28 bp, Artificial Sequence
  Description of Artificial Sequence: Synthetic primer
gttcaatggtttcaagataaggtcatcg

SEQ ID NO: 20990 - DNA, 27 bp, Artificial Sequence
  Description of Artificial Sequence: Synthetic primer
gatgtagtaccttggaagcttcctaat

SEQ ID NO: 20991 - DNA, 28 bp, Artificial Sequence
  Description of Artificial Sequence: Synthetic primer
agtaaccatcaagtcaatctgaaaggtt

SEQ ID NO: 20992 - DNA, 21 bp, Artificial Sequence
  Description of Artificial Sequence: Synthetic primer
tgaatcagtgtagtcgtgcgt

SEQ ID NO: 20993 - DNA, 26 bp, Artificial Sequence
  Description of Artificial Sequence: Synthetic primer
gccacaagggtcaatacatttgaatt

SEQ ID NO: 20994 - DNA, 26 bp, Artificial Sequence
  Description of Artificial Sequence: Synthetic primer
ctacttttgtgttatgatgcatgcga

SEQ ID NO: 20995 - DNA, 23 bp, Artificial Sequence
  Description of Artificial Sequence: Synthetic primer
tcaccacttgcacaacattctct

SEQ ID NO: 20996 - DNA, 21 bp, Artificial Sequence
  Description of Artificial Sequence: Synthetic primer
cagaagagcactgccggttta

SEQ ID NO: 20997 - DNA, 19 bp, Artificial Sequence
  Description of Artificial Sequence: Synthetic primer
atctagtgcagcgccatcg

SEQ ID NO: 20998 - DNA, 25 bp, Artificial Sequence
  Description of Artificial Sequence: Synthetic primer
gtcaccaagctggacagtaaataac

SEQ ID NO: 20999 - DNA, 21 bp, Artificial Sequence
  Description of Artificial Sequence: Synthetic primer
agctgcgaactggcattactg

SEQ ID NO: 21000 - DNA, 22 bp, Artificial Sequence
  Description of Artificial Sequence: Synthetic primer
gcagcccgatcataccttgtta

SEQ ID NO: 21001 - DNA, 22 bp, Artificial Sequence
  Description of Artificial Sequence: Synthetic primer
tgacatggcagagtttgttgtg

SEQ ID NO: 21002 - DNA, 28 bp, Artificial Sequence
  Description of Artificial Sequence: Synthetic primer
gtgttatgagttaaccatttccctttcc

SEQ ID NO: 21003 - DNA, 28 bp, Artificial Sequence
  Description of Artificial Sequence: Synthetic primer
agctagttataccctctgaagtctgtac

SEQ ID NO: 21004 - DNA, 25 bp, Artificial Sequence
  Description of Artificial Sequence: Synthetic primer
ccccctataaatatgccactccatc

SEQ ID NO: 21005 - DNA, 27 bp, Artificial Sequence
  Description of Artificial Sequence: Synthetic primer
cgactgcaaaatacagtgtaactttga

SEQ ID NO: 21006 - DNA, 29 bp, Artificial Sequence
  Description of Artificial Sequence: Synthetic primer
tcatctagcaatgtgtaccaatgaaatca

SEQ ID NO: 21007 - DNA, 21 bp, Artificial Sequence
  Description of Artificial Sequence: Synthetic primer
aacatcactgtcacgccctac

SEQ ID NO: 21008 - DNA, 28 bp, Artificial Sequence
  Description of Artificial Sequence: Synthetic primer
acatatattagcaaccgatcccgtatca

SEQ ID NO: 21009 - DNA, 21 bp, Artificial Sequence
  Description of Artificial Sequence: Synthetic primer
agctagcccagattttggctt

SEQ ID NO: 21010 - DNA, 21 bp, Artificial Sequence
  Description of Artificial Sequence: Synthetic primer
gctgtagaaggcagctcactc

SEQ ID NO: 21011 - DNA, 24 bp, Artificial Sequence
  Description of Artificial Sequence: Synthetic primer
accgtggaagatattacctgcaaa

SEQ ID NO: 21012 - DNA, 24 bp, Artificial Sequence
  Description of Artificial Sequence: Synthetic primer
tctaatgtcctgctggtcaagaag

SEQ ID NO: 21013 - DNA, 21 bp, Artificial Sequence
  Description of Artificial Sequence: Synthetic primer
ttgaagatgaggaccggaagc

SEQ ID NO: 21014 - DNA, 26 bp, Artificial Sequence
  Description of Artificial Sequence: Synthetic primer
ccagcaatcaacactagacatcattg

SEQ ID NO: 21015 - DNA, 27 bp, Artificial Sequence
  Description of Artificial Sequence: Synthetic primer
aaaaaccatgtgctggagtagattttc

SEQ ID NO: 21016 - DNA, 21 bp, Artificial Sequence
  Description of Artificial Sequence: Synthetic primer
ttgccgacgaattgggaactt

SEQ ID NO: 21017 - DNA, 24 bp, Artificial Sequence
  Description of Artificial Sequence: Synthetic primer
ggaggtggcttatgaggaaatagt

SEQ ID NO: 21018 - DNA, 27 bp, Artificial Sequence
  Description of Artificial Sequence: Synthetic primer
atcaagcatgaatattgaaggtgcatt

SEQ ID NO: 21019 - DNA, 23 bp, Artificial Sequence
  Description of Artificial Sequence: Synthetic primer
aggcaaagggaggttggagaata

SEQ ID NO: 21020 - DNA, 27 bp, Artificial Sequence
  Description of Artificial Sequence: Synthetic primer
cggtggtcagcttaatatcatgatagg

SEQ ID NO: 21021 - DNA, 28 bp, Artificial Sequence
  Description of Artificial Sequence: Synthetic primer
tggaaagaaagtcatgctcttctagatg

SEQ ID NO: 21022 - DNA, 25 bp, Artificial Sequence
  Description of Artificial Sequence: Synthetic primer
ttgaacagaagcatttgacaacagc

SEQ ID NO: 21023 - DNA, 21 bp, Artificial Sequence
  Description of Artificial Sequence: Synthetic primer
gttgatccatggcaggaacga

SEQ ID NO: 21024 - DNA, 23 bp, Artificial Sequence
  Description of Artificial Sequence: Synthetic primer
acgctataggaactacaggctga

SEQ ID NO: 21025 - DNA, 28 bp, Artificial Sequence
  Description of Artificial Sequence: Synthetic primer
tctagtattcaacaatgcactaagtggt

SEQ ID NO: 21026 - DNA, 24 bp, Artificial Sequence
  Description of Artificial Sequence: Synthetic primer
catatcctacaaacacaccggagt

SEQ ID NO: 21027 - DNA, 22 bp, Artificial Sequence
  Description of Artificial Sequence: Synthetic primer
gggcatgatgtcctttgccata

SEQ ID NO: 21028 - DNA, 28 bp, Artificial Sequence
  Description of Artificial Sequence: Synthetic primer
gaatagatcaataattgtcctgcacacc

SEQ ID NO: 21029 - DNA, 24 bp, Artificial Sequence
  Description of Artificial Sequence: Synthetic primer
agcaatttagaaaccagcggtttg

SEQ ID NO: 21030 - DNA, 27 bp, Artificial Sequence
  Description of Artificial Sequence: Synthetic primer
ggtgaaattatgcagatggtgatggta

SEQ ID NO: 21031 - DNA, 26 bp, Artificial Sequence
  Description of Artificial Sequence: Synthetic primer
tggtcatcaacttaaagtaggatggt

SEQ ID NO: 21032 - DNA, 22 bp, Artificial Sequence
  Description of Artificial Sequence: Synthetic primer
gtccacattgttgctgatgagg

SEQ ID NO: 21033 - DNA, 25 bp, Artificial Sequence
  Description of Artificial Sequence: Synthetic primer
gacagaattcttccagcatacatgg

SEQ ID NO: 21034 - DNA, 22 bp, Artificial Sequence
  Description of Artificial Sequence: Synthetic primer
tctgcatccgtctgacaaagtt

SEQ ID NO: 21035 - DNA, 22 bp, Artificial Sequence
  Description of Artificial Sequence: Synthetic primer
actgatttttaagcgcctcgga

SEQ ID NO: 21036 - DNA, 19 bp, Artificial Sequence
  Description of Artificial Sequence: Synthetic primer
gggtccagatgggttcagg

SEQ ID NO: 21037 - DNA, 25 bp, Artificial Sequence
  Description of Artificial Sequence: Synthetic primer
gtgagctaaaagttggtatcagagc

SEQ ID NO: 21038 - DNA, 21 bp, Artificial Sequence
  Description of Artificial Sequence: Synthetic primer
aatctaaccccggttgctctg

SEQ ID NO: 21039 - DNA, 21 bp, Artificial Sequence
  Description of Artificial Sequence: Synthetic primer
ttaggcagccaactcccttct

SEQ ID NO: 21040 - DNA, 25 bp, Artificial Sequence
  Description of Artificial Sequence: Synthetic primer
ctggcctttatgttctctccattct

SEQ ID NO: 21041 - DNA, 26 bp, Artificial Sequence
  Description of Artificial Sequence: Synthetic primer
gcggaacattattttcactgatctca

SEQ ID NO: 21042 - DNA, 28 bp, Artificial Sequence
  Description of Artificial Sequence: Synthetic primer
tctgcttggtgaactaaactcataagtc

SEQ ID NO: 21043 - DNA, 24 bp, Artificial Sequence
  Description of Artificial Sequence: Synthetic primer
aagaatccactgcatcaacttgac

SEQ ID NO: 21044 - DNA, 21 bp, Artificial Sequence
  Description of Artificial Sequence: Synthetic primer
agctctagttcgttcctgcac

SEQ ID NO: 21045 - DNA, 23 bp, Artificial Sequence
  Description of Artificial Sequence: Synthetic primer
cagcgtagtactcaggtgaacat

SEQ ID NO: 21046 - DNA, 28 bp, Artificial Sequence
  Description of Artificial Sequence: Synthetic primer
tgaagacaatattgcttgatgtgattcg

SEQ ID NO: 21047 - DNA, 21 bp, Artificial Sequence
  Description of Artificial Sequence: Synthetic primer
agggatggcaaggtatacgtg

SEQ ID NO: 21048 - DNA, 27 bp, Artificial Sequence
  Description of Artificial Sequence: Synthetic primer
tcccttatcctgacagaattctcatct

SEQ ID NO: 21049 - DNA, 27 bp, Artificial Sequence
  Description of Artificial Sequence: Synthetic primer
aatgggtaccttaactagatctgcatt

SEQ ID NO: 21050 - DNA, 21 bp, Artificial Sequence
  Description of Artificial Sequence: Synthetic primer
gatggtccagtgcaggatgac

SEQ ID NO: 21051 - DNA, 25 bp, Artificial Sequence
  Description of Artificial Sequence: Synthetic primer
caaacccaatcttgtaaccctgaag

SEQ ID NO: 21052 - DNA, 22 bp, Artificial Sequence
  Description of Artificial Sequence: Synthetic primer
cggtgataccagagagtccagt

SEQ ID NO: 21053 - DNA, 28 bp, Artificial Sequence
  Description of Artificial Sequence: Synthetic primer
gcagtaaaaatgaaggagaaagaaagca

SEQ ID NO: 21054 - DNA, 28 bp, Artificial Sequence
  Description of Artificial Sequence: Synthetic primer
ggtaagcacaaaagttatttcgtgaaca

SEQ ID NO: 21055 - DNA, 23 bp, Artificial Sequence
  Description of Artificial Sequence: Synthetic primer
tgtgtaacttaaggcaacctgga

SEQ ID NO: 21056 - DNA, 27 bp, Artificial Sequence
  Description of Artificial Sequence: Synthetic primer
tgataggcaagtctgctctaattatgc

SEQ ID NO: 21057 - DNA, 25 bp, Artificial Sequence
  Description of Artificial Sequence: Synthetic primer
caattaggcctgaagttgtaacgag

SEQ ID NO: 21058 - DNA, 25 bp, Artificial Sequence
  Description of Artificial Sequence: Synthetic primer
tccatgtatccatttcatgtccctt

SEQ ID NO: 21059 - DNA, 25 bp, Artificial Sequence
  Description of Artificial Sequence: Synthetic primer
tgtttaaggagctagtttccacgat

SEQ ID NO: 21060 - DNA, 27 bp, Artificial Sequence
  Description of Artificial Sequence: Synthetic primer
agattttccaaacgctatagaggttcc

SEQ ID NO: 21061 - DNA, 22 bp, Artificial Sequence
  Description of Artificial Sequence: Synthetic primer
ccctcagcagctccccttatta

SEQ ID NO: 21062 - DNA, 21 bp, Artificial Sequence
  Description of Artificial Sequence: Synthetic primer
gctagctaggccatgaaaccc

SEQ ID NO: 21063 - DNA, 28 bp, Artificial Sequence
  Description of Artificial Sequence: Synthetic primer
tcatccaacaatctactctgaagtaacc

SEQ ID NO: 21064 - DNA, 28 bp, Artificial Sequence
  Description of Artificial Sequence: Synthetic primer
cagcatctatcaattttcagtttcctca

SEQ ID NO: 21065 - DNA, 27 bp, Artificial Sequence
  Description of Artificial Sequence: Synthetic primer
gctatagcatagtctggagtagctaag

SEQ ID NO: 21066 - DNA, 23 bp, Artificial Sequence
  Description of Artificial Sequence: Synthetic primer
gaggtgttgctgtcgtttttaca

SEQ ID NO: 21067 - DNA, 21 bp, Artificial Sequence
  Description of Artificial Sequence: Synthetic primer
gtttgaccatggacggctcta

SEQ ID NO: 21068 - DNA, 22 bp, Artificial Sequence
  Description of Artificial Sequence: Synthetic primer
aacactaacgaatgtgggttgc

SEQ ID NO: 21069 - DNA, 19 bp, Artificial Sequence
  Description of Artificial Sequence: Synthetic primer
gctggtcaccgtttcctca

SEQ ID NO: 21070 - DNA, 23 bp, Artificial Sequence
  Description of Artificial Sequence: Synthetic primer
gaactacaagagggccgaaaatc

SEQ ID NO: 21071 - DNA, 26 bp, Artificial Sequence
  Description of Artificial Sequence: Synthetic primer
gccggctgtatagaggtatagtctta

SEQ ID NO: 21072 - DNA, 24 bp, Artificial Sequence
  Description of Artificial Sequence: Synthetic primer
gacgaagaatttgagggagattgc

SEQ ID NO: 21073 - DNA, 30 bp, Artificial Sequence
  Description of Artificial Sequence: Synthetic primer
cgttttatctatcaaatcactccagatcca

SEQ ID NO: 21074 - DNA, 26 bp, Artificial Sequence
  Description of Artificial Sequence: Synthetic primer
ctcagtgagcaaattcacgaactatg

SEQ ID NO: 21075 - DNA, 19 bp, Artificial Sequence
  Description of Artificial Sequence: Synthetic primer
caacctgcggtttcgtctg

SEQ ID NO: 21076 - DNA, 28 bp, Artificial Sequence
  Description of Artificial Sequence: Synthetic primer
aggacaattactaactgcatcaccattt

SEQ ID NO: 21077 - DNA, 22 bp, Artificial Sequence
  Description of Artificial Sequence: Synthetic primer
caagccaagaatgtggattccg

SEQ ID NO: 21078 - DNA, 28 bp, Artificial Sequence
  Description of Artificial Sequence: Synthetic primer
tgtgtcctacagtcctactacttaagtt

SEQ ID NO: 21079 - DNA, 21 bp, Artificial Sequence
  Description of Artificial Sequence: Synthetic primer
catggaagagcgaccgatgag

SEQ ID NO: 21080 - DNA, 21 bp, Artificial Sequence
  Description of Artificial Sequence: Synthetic primer
ttgtgtcgccatctgtaacca

SEQ ID NO: 21081 - DNA, 21 bp, Artificial Sequence
  Description of Artificial Sequence: Synthetic primer
ctgttagggtcccaactcctg

SEQ ID NO: 21082 - DNA, 28 bp, Artificial Sequence
  Description of Artificial Sequence: Synthetic primer
agtcttgttagatctctaggaaccaatg

SEQ ID NO: 21083 - DNA, 21 bp, Artificial Sequence
  Description of Artificial Sequence: Synthetic primer
ctcaggatgttctccgacgac

SEQ ID NO: 21084 - DNA, 21 bp, Artificial Sequence
  Description of Artificial Sequence: Synthetic primer
caacccaggctcctatcttcg

SEQ ID NO: 21085 - DNA, 22 bp, Artificial Sequence
  Description of Artificial Sequence: Synthetic primer
agtggaacaccactcactgatc

SEQ ID NO: 21086 - DNA, 21 bp, Artificial Sequence
  Description of Artificial Sequence: Synthetic primer
gtcgtgcacagtaccgaagag

SEQ ID NO: 21087 - DNA, 22 bp, Artificial Sequence
  Description of Artificial Sequence: Synthetic primer
ccacagggcacacctatacttt

SEQ ID NO: 21088 - DNA, 25 bp, Artificial Sequence
  Description of Artificial Sequence: Synthetic primer
gagttggttctcttttgtacatgct

SEQ ID NO: 21089 - DNA, 25 bp, Artificial Sequence
  Description of Artificial Sequence: Synthetic primer
ccaaatctgacattggaatgggatg

SEQ ID NO: 21090 - DNA, 19 bp, Artificial Sequence
  Description of Artificial Sequence: Synthetic primer
ccacatccgtgcatcttcc

SEQ ID NO: 21091 - DNA, 25 bp, Artificial Sequence
  Description of Artificial Sequence: Synthetic primer
ccaggaataatctagtatgccgctt

SEQ ID NO: 21092 - DNA, 19 bp, Artificial Sequence
  Description of Artificial Sequence: Synthetic primer
catccacaccgcatcggta

SEQ ID NO: 21093 - DNA, 28 bp, Artificial Sequence
  Description of Artificial Sequence: Synthetic primer
acctcggtttaagatttttatcctcctt

SEQ ID NO: 21094 - DNA, 28 bp, Artificial Sequence
  Description of Artificial Sequence: Synthetic primer
tgaatttaattttgtatcctggccacat

SEQ ID NO: 21095 - DNA, 21 bp, Artificial Sequence
  Description of Artificial Sequence: Synthetic primer
aggatactcaccgggtggtac

SEQ ID NO: 21096 - DNA, 26 bp, Artificial Sequence
  Description of Artificial Sequence: Synthetic primer
gtattggttaaagtttttggcaccct

SEQ ID NO: 21097 - DNA, 19 bp, Artificial Sequence
  Description of Artificial Sequence: Synthetic primer
caaggatgctggccaccaa

SEQ ID NO: 21098 - DNA, 28 bp, Artificial Sequence
  Description of Artificial Sequence: Synthetic primer
agtatttctgcaacccaattttgtcaat

SEQ ID NO: 21099 - DNA, 21 bp, Artificial Sequence
  Description of Artificial Sequence: Synthetic primer
aaatcggagaggtgcaagagc

SEQ ID NO: 21100 - DNA, 27 bp, Artificial Sequence
  Description of Artificial Sequence: Synthetic primer
gcaggtgaaaatgttatcatcatgcaa

SEQ ID NO: 21101 - DNA, 21 bp, Artificial Sequence
  Description of Artificial Sequence: Synthetic primer
tatgtccagtcaggcaccttc

SEQ ID NO: 21102 - DNA, 22 bp, Artificial Sequence
  Description of Artificial Sequence: Synthetic primer
ctgagataacccagcaggacag

SEQ ID NO: 21103 - DNA, 28 bp, Artificial Sequence
  Description of Artificial Sequence: Synthetic primer
accgagtatacaaatcattgttcacctt

SEQ ID NO: 21104 - DNA, 28 bp, Artificial Sequence
  Description of Artificial Sequence: Synthetic primer
aatttcattagcattatgagcagcactt

SEQ ID NO: 21105 - DNA, 27 bp, Artificial Sequence
  Description of Artificial Sequence: Synthetic primer
tgttattggcatattcacattggttcc

SEQ ID NO: 21106 - DNA, 28 bp, Artificial Sequence
  Description of Artificial Sequence: Synthetic primer
ggcgaaataaacttgcattagcaatgta

SEQ ID NO: 21107 - DNA, 22 bp, Artificial Sequence
  Description of Artificial Sequence: Synthetic primer
gacccgggtgcaagattttcta

SEQ ID NO: 21108 - DNA, 25 bp, Artificial Sequence
  Description of Artificial Sequence: Synthetic primer
catccaagcttctacagctatgagt

SEQ ID NO: 21109 - DNA, 24 bp, Artificial Sequence
  Description of Artificial Sequence: Synthetic primer
acagcttcacaccgcaatataaca

SEQ ID NO: 21110 - DNA, 24 bp, Artificial Sequence
  Description of Artificial Sequence: Synthetic primer
tgtaaatagcatgcatgcatcagg

SEQ ID NO: 21111 - DNA, 23 bp, Artificial Sequence
  Description of Artificial Sequence: Synthetic primer
tgctccattcaatacgttcacga

SEQ ID NO: 21112 - DNA, 28 bp, Artificial Sequence
  Description of Artificial Sequence: Synthetic primer
tccattctaaagagaactacctgacaga

SEQ ID NO: 21113 - DNA, 22 bp, Artificial Sequence
  Description of Artificial Sequence: Synthetic primer
tcagtgacactgacggatatgc

SEQ ID NO: 21114 - DNA, 21 bp, Artificial Sequence
  Description of Artificial Sequence: Synthetic primer
gagttgctgcctaagctggag

SEQ ID NO: 21115 - DNA, 19 bp, Artificial Sequence
  Description of Artificial Sequence: Synthetic primer
ccattgggagcacgtccag

SEQ ID NO: 21116 - DNA, 28 bp, Artificial Sequence
  Description of Artificial Sequence: Synthetic primer
cagatcttttggtgtatctgcaaattcc

SEQ ID NO: 21117 - DNA, 21 bp, Artificial Sequence
  Description of Artificial Sequence: Synthetic primer
gaagagaagctgctcggagac

SEQ ID NO: 21118 - DNA, 25 bp, Artificial Sequence
  Description of Artificial Sequence: Synthetic primer
tgaattgcacgcaatgagttaatcc

SEQ ID NO: 21119 - DNA, 24 bp, Artificial Sequence
  Description of Artificial Sequence: Synthetic primer
acagttttacccttgctatgcctt

SEQ ID NO: 21120 - DNA, 26 bp, Artificial Sequence
  Description of Artificial Sequence: Synthetic primer
agcatacataactgatcatgctgtga

SEQ ID NO: 21121 - DNA, 19 bp, Artificial Sequence
  Description of Artificial Sequence: Synthetic primer
tgctcgtggttgcttgttc

SEQ ID NO: 21122 - DNA, 26 bp, Artificial Sequence
  Description of Artificial Sequence: Synthetic primer
agttcaatgcttaaacacaaatgcca

SEQ ID NO: 21123 - DNA, 21 bp, Artificial Sequence
  Description of Artificial Sequence: Synthetic primer
gcagcgtgttgtgcttttatg

SEQ ID NO: 21124 - DNA, 21 bp, Artificial Sequence
  Description of Artificial Sequence: Synthetic primer
aagctggatgcttccaacaac

SEQ ID NO: 21125 - DNA, 22 bp, Artificial Sequence
  Description of Artificial Sequence: Synthetic primer
tcagtcgctacttccaacaact

SEQ ID NO: 21126 - DNA, 22 bp, Artificial Sequence
  Description of Artificial Sequence: Synthetic primer
tgacgacacccaagaatcttca

SEQ ID NO: 21127 - DNA, 22 bp, Artificial Sequence
  Description of Artificial Sequence: Synthetic primer
agaagtccacgtgctagctaaa

SEQ ID NO: 21128 - DNA, 23 bp, Artificial Sequence
  Description of Artificial Sequence: Synthetic primer
caccttgcagctctatgaaatgc

SEQ ID NO: 21129 - DNA, 28 bp, Artificial Sequence
  Description of Artificial Sequence: Synthetic primer
ggaacaaatgactaatgacacatgtcaa

SEQ ID NO: 21130 - DNA, 22 bp, Artificial Sequence
  Description of Artificial Sequence: Synthetic primer
gcgagcagtaattcaccattgt

SEQ ID NO: 21131 - DNA, 21 bp, Artificial Sequence
  Description of Artificial Sequence: Synthetic primer
gcgtctcccttgagtaccatg

SEQ ID NO: 21132 - DNA, 21 bp, Artificial Sequence
  Description of Artificial Sequence: Synthetic primer
tttttcagagccctcgcattg

SEQ ID NO: 21133 - DNA, 21 bp, Artificial Sequence
  Description of Artificial Sequence: Synthetic primer
cttacccttaggccagcaaga

SEQ ID NO: 21134 - DNA, 21 bp, Artificial Sequence
  Description of Artificial Sequence: Synthetic primer
ggcaacttcagacaagggttc

SEQ ID NO: 21135 - DNA, 28 bp, Artificial Sequence
  Description of Artificial Sequence: Synthetic primer
cattttgaagctgatgactgtgatgatt

SEQ ID NO: 21136 - DNA, 23 bp, Artificial Sequence
  Description of Artificial Sequence: Synthetic primer
acaagtgagctaaccaagtggtc

SEQ ID NO: 21137 - DNA, 24 bp, Artificial Sequence
  Description of Artificial Sequence: Synthetic primer
ctgaaaggtagggttcacacttga

SEQ ID NO: 21138 - DNA, 26 bp, Artificial Sequence
  Description of Artificial Sequence: Synthetic primer
actgttcattcctaaattctctccca

SEQ ID NO: 21139 - DNA, 24 bp, Artificial Sequence
  Description of Artificial Sequence: Synthetic primer
gaatgctggtcatgtgtttttcca

SEQ ID NO: 21140 - DNA, 22 bp, Artificial Sequence
  Description of Artificial Sequence: Synthetic primer
gacataatgccccctatggtgt

SEQ ID NO: 21141 - DNA, 23 bp, Artificial Sequence
  Description of Artificial Sequence: Synthetic primer
ttcagaggcatcaacaacaggaa

SEQ ID NO: 21142 - DNA, 22 bp, Artificial Sequence
  Description of Artificial Sequence: Synthetic primer
tcaccgtcctctagtgtagtca

SEQ ID NO: 21143 - DNA, 22 bp, Artificial Sequence
  Description of Artificial Sequence: Synthetic primer
cccgatgtcttgtgtcaactcc

SEQ ID NO: 21144 - DNA, 24 bp, Artificial Sequence
  Description of Artificial Sequence: Synthetic primer
gggaagaacaaggcttttcatgag

SEQ ID NO: 21145 - DNA, 21 bp, Artificial Sequence
  Description of Artificial Sequence: Synthetic primer
accctccaaggtgaactacac

SEQ ID NO: 21146 - DNA, 28 bp, Artificial Sequence
  Description of Artificial Sequence: Synthetic primer
gtgtcagattcggtacaactttgtacta

SEQ ID NO: 21147 - DNA, 21 bp, Artificial Sequence
  Description of Artificial Sequence: Synthetic primer
cacggagatgccgactatgat

SEQ ID NO: 21148 - DNA, 25 bp, Artificial Sequence
  Description of Artificial Sequence: Synthetic primer
agggtttgggaattttggtctagag

SEQ ID NO: 21149 - DNA, 21 bp, Artificial Sequence
  Description of Artificial Sequence: Synthetic primer
tttccggccgcataacatact

SEQ ID NO: 21150 - DNA, 28 bp, Artificial Sequence
  Description of Artificial Sequence: Synthetic primer
gggaattaagaaacagtcatgcaagtag

SEQ ID NO: 21151 - DNA, 21 bp, Artificial Sequence
  Description of Artificial Sequence: Synthetic primer
cggatcaccggtccattcttt

SEQ ID NO: 21152 - DNA, 27 bp, Artificial Sequence
  Description of Artificial Sequence: Synthetic primer
gggagggctctaacctaaaattgtaag

SEQ ID NO: 21153 - DNA, 21 bp, Artificial Sequence
  Description of Artificial Sequence: Synthetic primer
attgtggtggtcgtcaactgg

SEQ ID NO: 21154 - DNA, 26 bp, Artificial Sequence
  Description of Artificial Sequence: Synthetic primer
gggagcttctcttgtgaatgaatcta

SEQ ID NO: 21155 - DNA, 21 bp, Artificial Sequence
  Description of Artificial Sequence: Synthetic primer
gtgccatgtctctggtcctag

SEQ ID NO: 21156 - DNA, 22 bp, Artificial Sequence
  Description of Artificial Sequence: Synthetic primer
tcgtcacgctcccataatcaaa

SEQ ID NO: 21157 - DNA, 23 bp, Artificial Sequence
  Description of Artificial Sequence: Synthetic primer
actcctcagtatgggtatcagga

SEQ ID NO: 21158 - DNA, 21 bp, Artificial Sequence
  Description of Artificial Sequence: Synthetic primer
aagatgctgggtgagtggaaa

SEQ ID NO: 21159 - DNA, 27 bp, Artificial Sequence
  Description of Artificial Sequence: Synthetic primer
aggatgatagaaatattcgcctctgtg

SEQ ID NO: 21160 - DNA, 26 bp, Artificial Sequence
  Description of Artificial Sequence: Synthetic primer
aggattgtgacatgtaactgacactt

SEQ ID NO: 21161 - DNA, 26 bp, Artificial Sequence
  Description of Artificial Sequence: Synthetic primer
catgaatagacgacactcaacaagtc

SEQ ID NO: 21162 - DNA, 27 bp, Artificial Sequence
  Description of Artificial Sequence: Synthetic primer
cggtaagacagaatagttgatccagac

SEQ ID NO: 21163 - DNA, 26 bp, Artificial Sequence
  Description of Artificial Sequence: Synthetic primer
tgcgaaagtctaaactctgaagaagg

SEQ ID NO: 21164 - DNA, 21 bp, Artificial Sequence
  Description of Artificial Sequence: Synthetic primer
gtgcattgggtgcacagattc

SEQ ID NO: 21165 - DNA, 21 bp, Artificial Sequence
  Description of Artificial Sequence: Synthetic primer
ctgaagcttgaagcctagcct

SEQ ID NO: 21166 - DNA, 23 bp, Artificial Sequence
  Description of Artificial Sequence: Synthetic primer
gcattacgcaatcaacacctaca

SEQ ID NO: 21167 - DNA, 21 bp, Artificial Sequence
  Description of Artificial Sequence: Synthetic primer
tgttggctctgaatcctggtg

SEQ ID NO: 21168 - DNA, 28 bp, Artificial Sequence
  Description of Artificial Sequence: Synthetic primer
gagttgcgttgcaaatattctatacgtt

SEQ ID NO: 21169 - DNA, 26 bp, Artificial Sequence
  Description of Artificial Sequence: Synthetic primer
ggagaaggagcttacagtaagtagga

SEQ ID NO: 21170 - DNA, 21 bp, Artificial Sequence
  Description of Artificial Sequence: Synthetic primer
gtccatgatggaggcctcttg

SEQ ID NO: 21171 - DNA, 21 bp, Artificial Sequence
  Description of Artificial Sequence: Synthetic primer
gccaggagcgctaaaatgttg

SEQ ID NO: 21172 - DNA, 23 bp, Artificial Sequence
  Description of Artificial Sequence: Synthetic primer
cggatcttgaacagttttgccat

SEQ ID NO: 21173 - DNA, 26 bp, Artificial Sequence
  Description of Artificial Sequence: Synthetic primer
ggaaaatagatttggcgctaggaaaa

SEQ ID NO: 21174 - DNA, 22 bp, Artificial Sequence
  Description of Artificial Sequence: Synthetic primer
acgatgttaccctctgatgcag

SEQ ID NO: 21175 - DNA, 27 bp, Artificial Sequence
  Description of Artificial Sequence: Synthetic primer
gtcattaaggaaatggattgcttgaca

SEQ ID NO: 21176 - DNA, 26 bp, Artificial Sequence
  Description of Artificial Sequence: Synthetic primer
ccatggtgagtagtactagtacccaa

SEQ ID NO: 21177 - DNA, 23 bp, Artificial Sequence
  Description of Artificial Sequence: Synthetic primer
taattcagcatcgtcatcgtcgt

SEQ ID NO: 21178 - DNA, 23 bp, Artificial Sequence
  Description of Artificial Sequence: Synthetic primer
gcatcctgactcctccctaaatg

SEQ ID NO: 21179 - DNA, 23 bp, Artificial Sequence
  Description of Artificial Sequence: Synthetic primer
acttattatcgtcctcggcgatg

SEQ ID NO: 21180 - DNA, 28 bp, Artificial Sequence
  Description of Artificial Sequence: Synthetic primer
gcttttcatatgcaatcggaaatctcat

SEQ ID NO: 21181 - DNA, 23 bp, Artificial Sequence
  Description of Artificial Sequence: Synthetic primer
gcgtgggaatagctgttcttaca

SEQ ID NO: 21182 - DNA, 27 bp, Artificial Sequence
  Description of Artificial Sequence: Synthetic primer
accatggcaatttgatagagaatctgt

SEQ ID NO: 21183 - DNA, 28 bp, Artificial Sequence
  Description of Artificial Sequence: Synthetic primer
caagacgattatctcagtcttcaaaggt

SEQ ID NO: 21184 - DNA, 21 bp, Artificial Sequence
  Description of Artificial Sequence: Synthetic primer
gtcggatgggcagatgttgag

SEQ ID NO: 21185 - DNA, 22 bp, Artificial Sequence
  Description of Artificial Sequence: Synthetic primer
ttaccctcctgctccattttgt

SEQ ID NO: 21186 - DNA, 21 bp, Artificial Sequence
  Description of Artificial Sequence: Synthetic primer
caggccacctcatgtgagtag

SEQ ID NO: 21187 - DNA, 21 bp, Artificial Sequence
  Description of Artificial Sequence: Synthetic primer
gcagggcaaaacatgcactta

SEQ ID NO: 21188 - DNA, 27 bp, Artificial Sequence
  Description of Artificial Sequence: Synthetic primer
tgttttggtatctctattttggcagca

SEQ ID NO: 21189 - DNA, 28 bp, Artificial Sequence
  Description of Artificial Sequence: Synthetic primer
agatagagaaattatggcgttttgcatg

SEQ ID NO: 21190 - DNA, 21 bp, Artificial Sequence
  Description of Artificial Sequence: Synthetic primer
aggcttgagcaactctcttcc

SEQ ID NO: 21191 - DNA, 25 bp, Artificial Sequence
  Description of Artificial Sequence: Synthetic primer
gtagtattcactcactgaccacaca

SEQ ID NO: 21192 - DNA, 21 bp, Artificial Sequence
  Description of Artificial Sequence: Synthetic primer
actctgcactgatggcaaagc

SEQ ID NO: 21193 - DNA, 27 bp, Artificial Sequence
  Description of Artificial Sequence: Synthetic primer
gtattatttctaccagcagagctccat

SEQ ID NO: 21194 - DNA, 19 bp, Artificial Sequence
  Description of Artificial Sequence: Synthetic primer
agcatggcgtctcctccta

SEQ ID NO: 21195 - DNA, 25 bp, Artificial Sequence
  Description of Artificial Sequence: Synthetic primer
accttgaatactcttcggagacatg

SEQ ID NO: 21196 - DNA, 24 bp, Artificial Sequence
  Description of Artificial Sequence: Synthetic primer
tttctaaccatgtgctccacatct

SEQ ID NO: 21197 - DNA, 21 bp, Artificial Sequence
  Description of Artificial Sequence: Synthetic primer
ttgacctttgcatgtgtggtg

SEQ ID NO: 21198 - DNA, 27 bp, Artificial Sequence
  Description of Artificial Sequence: Synthetic primer
agtttcttcacaaatccccaaaaatgt

SEQ ID NO: 21199 - DNA, 21 bp, Artificial Sequence
  Description of Artificial Sequence: Synthetic primer
agctttccccatgatgcatga

SEQ ID NO: 21200 - DNA, 23 bp, Artificial Sequence
  Description of Artificial Sequence: Synthetic primer
tgcacctcattctcaatgctaga

SEQ ID NO: 21201 - DNA, 22 bp, Artificial Sequence
  Description of Artificial Sequence: Synthetic primer
cattgtagtcacctaggtggca

SEQ ID NO: 21202 - DNA, 21 bp, Artificial Sequence
  Description of Artificial Sequence: Synthetic primer
gtagcactgtgagcttgtcgt

SEQ ID NO: 21203 - DNA, 24 bp, Artificial Sequence
  Description of Artificial Sequence: Synthetic primer
gcagatctatccactacccagtca

SEQ ID NO: 21204 - DNA, 28 bp, Artificial Sequence
  Description of Artificial Sequence: Synthetic primer
cgcattgtacctgtaaaaagcagataat

SEQ ID NO: 21205 - DNA, 24 bp, Artificial Sequence
  Description of Artificial Sequence: Synthetic primer
aaaaatgatgccatagcaccttgt

SEQ ID NO: 21206 - DNA, 30 bp, Artificial Sequence
  Description of Artificial Sequence: Synthetic primer
tggtaaatgatccttttgagtaaccttctt

SEQ ID NO: 21207 - DNA, 22 bp, Artificial Sequence
  Description of Artificial Sequence: Synthetic primer
atggcacctcactactgtactg

SEQ ID NO: 21208 - DNA, 25 bp, Artificial Sequence
  Description of Artificial Sequence: Synthetic primer
tctgcttgtagatgccaagaagatt

SEQ ID NO: 21209 - DNA, 22 bp, Artificial Sequence
  Description of Artificial Sequence: Synthetic primer
gctgcaagcaactatgcaatca

SEQ ID NO: 21210 - DNA, 25 bp, Artificial Sequence
  Description of Artificial Sequence: Synthetic primer
agcatgaagtgtttctgctaactga

SEQ ID NO: 21211 - DNA, 26 bp, Artificial Sequence
  Description of Artificial Sequence: Synthetic primer
gcactgaagtatttaacctcctggtc

SEQ ID NO: 21212 - DNA, 21 bp, Artificial Sequence
  Description of Artificial Sequence: Synthetic primer
ccatgagtcgtccatggacat

SEQ ID NO: 21213 - DNA, 22 bp, Artificial Sequence
  Description of Artificial Sequence: Synthetic primer
gggcaacagccagaatcatagg

SEQ ID NO: 21214 - DNA, 28 bp, Artificial Sequence
  Description of Artificial Sequence: Synthetic primer
gcaggaaatggaatcaatatttggtgaa

SEQ ID NO: 21215 - DNA, 23 bp, Artificial Sequence
  Description of Artificial Sequence: Synthetic primer
gcagtgtctgacttggttaaagc

SEQ ID NO: 21216 - DNA, 23 bp, Artificial Sequence
  Description of Artificial Sequence: Synthetic primer
gcttatacatgcgtcaagtggtg

SEQ ID NO: 21217 - DNA, 26 bp, Artificial Sequence
  Description of Artificial Sequence: Synthetic primer
gccttaggcataaagaaactctcaga

SEQ ID NO: 21218 - DNA, 21 bp, Artificial Sequence
  Description of Artificial Sequence: Synthetic primer
agaaatcgcgaactgcaacag

SEQ ID NO: 21219 - DNA, 28 bp, Artificial Sequence
  Description of Artificial Sequence: Synthetic primer
agatagcagtttgttagatgaaaagggt

SEQ ID NO: 21220 - DNA, 28 bp, Artificial Sequence
  Description of Artificial Sequence: Synthetic primer
tgattaccagtttgcacagttatgtgta

SEQ ID NO: 21221 - DNA, 27 bp, Artificial Sequence
  Description of Artificial Sequence: Synthetic primer
gttgctgtgcaactaaagtatattggt

SEQ ID NO: 21222 - DNA, 22 bp, Artificial Sequence
  Description of Artificial Sequence: Synthetic primer
cctccagacactggaattccaa

SEQ ID NO: 21223 - DNA, 22 bp, Artificial Sequence
  Description of Artificial Sequence: Synthetic primer
ctgagtgtggatgagggagaag

SEQ ID NO: 21224 - DNA, 23 bp, Artificial Sequence
  Description of Artificial Sequence: Synthetic primer
agcaaagagttgacaaagtccca

SEQ ID NO: 21225 - DNA, 22 bp, Artificial Sequence
  Description of Artificial Sequence: Synthetic primer
taagctcggcacaaacagtgag

SEQ ID NO: 21226 - DNA, 21 bp, Artificial Sequence
  Description of Artificial Sequence: Synthetic primer
ggatgggagattgcagggaac

SEQ ID NO: 21227 - DNA, 22 bp, Artificial Sequence
  Description of Artificial Sequence: Synthetic primer
aacacaagcctctgtacccaaa

SEQ ID NO: 21228 - DNA, 21 bp, Artificial Sequence
  Description of Artificial Sequence: Synthetic primer
gaagggaatggcgcatagtgt

SEQ ID NO: 21229 - DNA, 23 bp, Artificial Sequence
  Description of Artificial Sequence: Synthetic primer
ccaataggtagggatgacagggt

SEQ ID NO: 21230 - DNA, 27 bp, Artificial Sequence
  Description of Artificial Sequence: Synthetic primer
ggtgaaaaggtaacagaaatgtggaaa

SEQ ID NO: 21231 - DNA, 28 bp, Artificial Sequence
  Description of Artificial Sequence: Synthetic primer
cggcaaagtttttgcattttcacaataa

SEQ ID NO: 21232 - DNA, 22 bp, Artificial Sequence
  Description of Artificial Sequence: Synthetic primer
gctttggttgacgtcgtctgta

SEQ ID NO: 21233 - DNA, 28 bp, Artificial Sequence
  Description of Artificial Sequence: Synthetic primer
ttgaaaacactgacaaagaattctgcaa

SEQ ID NO: 21234 - DNA, 27 bp, Artificial Sequence
  Description of Artificial Sequence: Synthetic primer
gataccctgaaccatatgttttgcatg

SEQ ID NO: 21235 - DNA, 23 bp, Artificial Sequence
  Description of Artificial Sequence: Synthetic primer
tcagacaacccaataagcccatc

SEQ ID NO: 21236 - DNA, 26 bp, Artificial Sequence
  Description of Artificial Sequence: Synthetic primer
acagacactccttcactttgatatcc

SEQ ID NO: 21237 - DNA, 26 bp, Artificial Sequence
  Description of Artificial Sequence: Synthetic primer
aggtgcaggattaaactaaacaaggt

SEQ ID NO: 21238 - DNA, 26 bp, Artificial Sequence
  Description of Artificial Sequence: Synthetic primer
cctttatttctcaggtgctttagcag

SEQ ID NO: 21239 - DNA, 21 bp, Artificial Sequence
  Description of Artificial Sequence: Synthetic primer
gtggccttttgttttcaccga

SEQ ID NO: 21240 - DNA, 22 bp, Artificial Sequence
  Description of Artificial Sequence: Synthetic primer
gccagagtgctattaggacctt

SEQ ID NO: 21241 - DNA, 28 bp, Artificial Sequence
  Description of Artificial Sequence: Synthetic primer
tttgcttgtgaaacaatttatggtctgt

SEQ ID NO: 21242 - DNA, 22 bp, Artificial Sequence
  Description of Artificial Sequence: Synthetic primer
agagcaaacaagctttggtgtt

SEQ ID NO: 21243 - DNA, 28 bp, Artificial Sequence
  Description of Artificial Sequence: Synthetic primer
gaaagaattcagttgggcttcattacat

SEQ ID NO: 21244 - DNA, 22 bp, Artificial Sequence
  Description of Artificial Sequence: Synthetic primer
tctccctctccatctacagagc

SEQ ID NO: 21245 - DNA, 20 bp, Artificial Sequence
  Description of Artificial Sequence: Synthetic primer
atgtccatgtcggtcagcac

SEQ ID NO: 21246 - DNA, 28 bp, Artificial Sequence
  Description of Artificial Sequence: Synthetic primer
tggtcttttctgttgttatccctaaaca

SEQ ID NO: 21247 - DNA, 27 bp, Artificial Sequence
  Description of Artificial Sequence: Synthetic primer
agcctaagttagtgccctactagattc

SEQ ID NO: 21248 - DNA, 27 bp, Artificial Sequence
  Description of Artificial Sequence: Synthetic primer
gggtatgtacttgggttcctataggag

SEQ ID NO: 21249 - DNA, 27 bp, Artificial Sequence
  Description of Artificial Sequence: Synthetic primer
cgagtcaagaacccattgttaatgcta

SEQ ID NO: 21250 - DNA, 27 bp, Artificial Sequence
  Description of Artificial Sequence: Synthetic primer
gaactaagaaaatcttggccacatctc

SEQ ID NO: 21251 - DNA, 21 bp, Artificial Sequence
  Description of Artificial Sequence: Synthetic primer
tgtctcaggcaaatgggtctt

SEQ ID NO: 21252 - DNA, 21 bp, Artificial Sequence
  Description of Artificial Sequence: Synthetic primer
atgtcttggcacatcaagcgt

SEQ ID NO: 21253 - DNA, 21 bp, Artificial Sequence
  Description of Artificial Sequence: Synthetic primer
atgtgatcttggcaagcctga

SEQ ID NO: 21254 - DNA, 23 bp, Artificial Sequence
  Description of Artificial Sequence: Synthetic primer
tacaacatctacaccacctccgt

SEQ ID NO: 21255 - DNA, 28 bp, Artificial Sequence
  Description of Artificial Sequence: Synthetic primer
aaaaatgtcctgtgaagaactcatcaac

SEQ ID NO: 21256 - DNA, 28 bp, Artificial Sequence
  Description of Artificial Sequence: Synthetic primer
ggcaatagaagtgacaggaaacataaga

SEQ ID NO: 21257 - DNA, 24 bp, Artificial Sequence
  Description of Artificial Sequence: Synthetic primer
tgggtattcttggagcatcagatc

SEQ ID NO: 21258 - DNA, 24 bp, Artificial Sequence
  Description of Artificial Sequence: Synthetic primer
gcgcccattttgttagttcatctg

SEQ ID NO: 21259 - DNA, 25 bp, Artificial Sequence
  Description of Artificial Sequence: Synthetic primer
gcaaatggatataaatgggcaagca

SEQ ID NO: 21260 - DNA, 25 bp, Artificial Sequence
  Description of Artificial Sequence: Synthetic primer
gcaagctgatatcgtccatttatgc

SEQ ID NO: 21261 - DNA, 22 bp, Artificial Sequence
  Description of Artificial Sequence: Synthetic primer
acctggttcgcttcttctcatt

SEQ ID NO: 21262 - DNA, 28 bp, Artificial Sequence
  Description of Artificial Sequence: Synthetic primer
agccccaaagacacataatcatgatatt

SEQ ID NO: 21263 - DNA, 29 bp, Artificial Sequence
  Description of Artificial Sequence: Synthetic primer
agtactaattaatgatcctttcgcacact

SEQ ID NO: 21264 - DNA, 22 bp, Artificial Sequence
  Description of Artificial Sequence: Synthetic primer
caccgcattggacagttgaatc

SEQ ID NO: 21265 - DNA, 21 bp, Artificial Sequence
  Description of Artificial Sequence: Synthetic primer
ctgaatagcgtctggctctgc

SEQ ID NO: 21266 - DNA, 19 bp, Artificial Sequence
  Description of Artificial Sequence: Synthetic primer
gtacatcgccgacgacctg

SEQ ID NO: 21267 - DNA, 28 bp, Artificial Sequence
  Description of Artificial Sequence: Synthetic primer
ccgacatattcctacaaatccttcaagt

SEQ ID NO: 21268 - DNA, 21 bp, Artificial Sequence
  Description of Artificial Sequence: Synthetic primer
tcgtggagtacctcttccctt

SEQ ID NO: 21269 - DNA, 25 bp, Artificial Sequence
  Description of Artificial Sequence: Synthetic primer
cgaggaggaagaggataaattcagc

SEQ ID NO: 21270 - DNA, 26 bp, Artificial Sequence
  Description of Artificial Sequence: Synthetic primer
atgctatttttgtacactgctagctg

SEQ ID NO: 21271 - DNA, 26 bp, Artificial Sequence
  Description of Artificial Sequence: Synthetic primer
cccttcttcttcaacatgtttgtcag

SEQ ID NO: 21272 - DNA, 23 bp, Artificial Sequence
  Description of Artificial Sequence: Synthetic primer
acaaagtcaccattgatctggga

SEQ ID NO: 21273 - DNA, 24 bp, Artificial Sequence
  Description of Artificial Sequence: Synthetic primer
tgaaggaccaaaggttagtatccc

SEQ ID NO: 21274 - DNA, 21 bp, Artificial Sequence
  Description of Artificial Sequence: Synthetic primer
tcccaagagagacgtccatgt

SEQ ID NO: 21275 - DNA, 28 bp, Artificial Sequence
  Description of Artificial Sequence: Synthetic primer
gcctgcaaacaatgattgtagatgtaat

SEQ ID NO: 21276 - DNA, 21 bp, Artificial Sequence
  Description of Artificial Sequence: Synthetic primer
gttctccatggcagacaatgc

SEQ ID NO: 21277 - DNA, 26 bp, Artificial Sequence
  Description of Artificial Sequence: Synthetic primer
acacatgtattgcttcaacctttgtt

SEQ ID NO: 21278 - DNA, 30 bp, Artificial Sequence
  Description of Artificial Sequence: Synthetic primer
aggtgttctttttatgttgtacgtatagtt

SEQ ID NO: 21279 - DNA, 21 bp, Artificial Sequence
  Description of Artificial Sequence: Synthetic primer
gagggccttcacttggaacac

SEQ ID NO: 21280 - DNA, 22 bp, Artificial Sequence
  Description of Artificial Sequence: Synthetic primer
ggccagaaaatcctaaggtggt

SEQ ID NO: 21281 - DNA, 27 bp, Artificial Sequence
  Description of Artificial Sequence: Synthetic primer
tgtcagcttgaggttacaaaggataat

SEQ ID NO: 21282 - DNA, 21 bp, Artificial Sequence
  Description of Artificial Sequence: Synthetic primer
aattctgccgctccagatgac

SEQ ID NO: 21283 - DNA, 27 bp, Artificial Sequence
  Description of Artificial Sequence: Synthetic primer
tgattcaggtggaggtcaattatgatg

SEQ ID NO: 21284 - DNA, 27 bp, Artificial Sequence
  Description of Artificial Sequence: Synthetic primer
aagtgacctgattgaacataaggagtg

SEQ ID NO: 21285 - DNA, 26 bp, Artificial Sequence
  Description of Artificial Sequence: Synthetic primer
aagagtcatgatgttccaataatgcg

SEQ ID NO: 21286 - DNA, 21 bp, Artificial Sequence
  Description of Artificial Sequence: Synthetic primer
cggaaacaagctgagttctgg

SEQ ID NO: 21287 - DNA, 21 bp, Artificial Sequence
  Description of Artificial Sequence: Synthetic primer
ctgtagcctgcacattgtgga

SEQ ID NO: 21288 - DNA, 27 bp, Artificial Sequence
  Description of Artificial Sequence: Synthetic primer
gttgaaatatgacgttacctgaaccac

SEQ ID NO: 21289 - DNA, 24 bp, Artificial Sequence
  Description of Artificial Sequence: Synthetic primer
cccaatcggttagaggactaaacc

SEQ ID NO: 21290 - DNA, 22 bp, Artificial Sequence
  Description of Artificial Sequence: Synthetic primer
gcacacaggtgaggaagaatga

SEQ ID NO: 21291 - DNA, 21 bp, Artificial Sequence
  Description of Artificial Sequence: Synthetic primer
gggttgtgctgccacataaat

SEQ ID NO: 21292 - DNA, 21 bp, Artificial Sequence
  Description of Artificial Sequence: Synthetic primer
ctcaggatctgccacaccaag

SEQ ID NO: 21293 - DNA, 26 bp, Artificial Sequence
  Description of Artificial Sequence: Synthetic primer
ttgctacacactgcagtactgataaa

SEQ ID NO: 21294 - DNA, 25 bp, Artificial Sequence
  Description of Artificial Sequence: Synthetic primer
acctctgagtaatggacaaagcaat

SEQ ID NO: 21295 - DNA, 27 bp, Artificial Sequence
  Description of Artificial Sequence: Synthetic primer
tgaagctcagaaaaagaagaagagtga

SEQ ID NO: 21296 - DNA, 22 bp, Artificial Sequence
  Description of Artificial Sequence: Synthetic primer
ggttatggacgtacgatggtgt

SEQ ID NO: 21297 - DNA, 27 bp, Artificial Sequence
  Description of Artificial Sequence: Synthetic primer
tcttcttcattcaagattgagttgtgc

SEQ ID NO: 21298 - DNA, 24 bp, Artificial Sequence
  Description of Artificial Sequence: Synthetic primer
tgagcaagagtttagggcctaaag

SEQ ID NO: 21299 - DNA, 26 bp, Artificial Sequence
  Description of Artificial Sequence: Synthetic primer
tcctccgtatcgtttatcagaacttt

SEQ ID NO: 21300 - DNA, 21 bp, Artificial Sequence
  Description of Artificial Sequence: Synthetic primer
gagtgtatcgctgtgggtgag

SEQ ID NO: 21301 - DNA, 21 bp, Artificial Sequence
  Description of Artificial Sequence: Synthetic primer
tgcaccatctgtgtagttgga

SEQ ID NO: 21302 - DNA, 28 bp, Artificial Sequence
  Description of Artificial Sequence: Synthetic primer
aagaggacctgtgttattcaattgacat

SEQ ID NO: 21303 - DNA, 28 bp, Artificial Sequence
  Description of Artificial Sequence: Synthetic primer
tcaaaccaatcttcactaggcatatctt

SEQ ID NO: 21304 - DNA, 23 bp, Artificial Sequence
  Description of Artificial Sequence: Synthetic primer
gaattctaggaggcaccatacga

SEQ ID NO: 21305 - DNA, 21 bp, Artificial Sequence
  Description of Artificial Sequence: Synthetic primer
ccggctcctgtttctcttctt

SEQ ID NO: 21306 - DNA, 28 bp, Artificial Sequence
  Description of Artificial Sequence: Synthetic primer
ccatacaggcacatagaagttaagatca

SEQ ID NO: 21307 - DNA, 24 bp, Artificial Sequence
  Description of Artificial Sequence: Synthetic primer
gcgtgtgtagatatcacaagaagc

SEQ ID NO: 21308 - DNA, 22 bp, Artificial Sequence
  Description of Artificial Sequence: Synthetic primer
tccacctcacatgtacttgagc

SEQ ID NO: 21309 - DNA, 23 bp, Artificial Sequence
  Description of Artificial Sequence: Synthetic primer
agtcaacctcacagtcagtctca

SEQ ID NO: 21310 - DNA, 23 bp, Artificial Sequence
  Description of Artificial Sequence: Synthetic primer
ccgaaggtttacggtgtttgcta

SEQ ID NO: 21311 - DNA, 28 bp, Artificial Sequence
  Description of Artificial Sequence: Synthetic primer
tgaagattatggcaagtgttttccctta

SEQ ID NO: 21312 - DNA, 21 bp, Artificial Sequence
  Description of Artificial Sequence: Synthetic primer
gttctacagcaggtggtgagc

SEQ ID NO: 21313 - DNA, 25 bp, Artificial Sequence
  Description of Artificial Sequence: Synthetic primer
ccaaccttgcagttcactgaatttg

SEQ ID NO: 21314 - DNA, 25 bp, Artificial Sequence
  Description of Artificial Sequence: Synthetic primer
tcttccttcctctccttcttctacg

SEQ ID NO: 21315 - DNA, 22 bp, Artificial Sequence
  Description of Artificial Sequence: Synthetic primer
gacatctgtctttggcatgagc

SEQ ID NO: 21316 - DNA, 21 bp, Artificial Sequence
  Description of Artificial Sequence: Synthetic primer
atacgcctgggtggtattgtg

SEQ ID NO: 21317 - DNA, 28 bp, Artificial Sequence
  Description of Artificial Sequence: Synthetic primer
agcgcaaagccctaatcaactatattaa

SEQ ID NO: 21318 - DNA, 28 bp, Artificial Sequence
  Description of Artificial Sequence: Synthetic primer
cagtcatagaaaaacgatctggaaaagc

SEQ ID NO: 21319 - DNA, 24 bp, Artificial Sequence
  Description of Artificial Sequence: Synthetic primer
gataatcaatggcctagacaacgc

SEQ ID NO: 21320 - DNA, 28 bp, Artificial Sequence
  Description of Artificial Sequence: Synthetic primer
gaaattagaccagacttgggataactga

SEQ ID NO: 21321 - DNA, 22 bp, Artificial Sequence
  Description of Artificial Sequence: Synthetic primer
gtgtggctagcaattgtacgtg

SEQ ID NO: 21322 - DNA, 21 bp, Artificial Sequence
  Description of Artificial Sequence: Synthetic primer
atgccctccaaccactgttac

SEQ ID NO: 21323 - DNA, 22 bp, Artificial Sequence
  Description of Artificial Sequence: Synthetic primer
agatccacaagttggctcctac

SEQ ID NO: 21324 - DNA, 26 bp, Artificial Sequence
  Description of Artificial Sequence: Synthetic primer
gggctaccttttagaacacagaagaa

SEQ ID NO: 21325 - DNA, 21 bp, Artificial Sequence
  Description of Artificial Sequence: Synthetic primer
ctcttcaactccggtgtgctt

SEQ ID NO: 21326 - DNA, 28 bp, Artificial Sequence
  Description of Artificial Sequence: Synthetic primer
aggtttgaccatagttcctcaagatttt

SEQ ID NO: 21327 - DNA, 24 bp, Artificial Sequence
  Description of Artificial Sequence: Synthetic primer
tcatctcacttctctcttctccca

SEQ ID NO: 21328 - DNA, 21 bp, Artificial Sequence
  Description of Artificial Sequence: Synthetic primer
gacgggcagttaccttcagat

SEQ ID NO: 21329 - DNA, 24 bp, Artificial Sequence
  Description of Artificial Sequence: Synthetic primer
actatcagtatctgcaacttggct

SEQ ID NO: 21330 - DNA, 23 bp, Artificial Sequence
  Description of Artificial Sequence: Synthetic primer
tccaactgatgcaagttttggtg

SEQ ID NO: 21331 - DNA, 22 bp, Artificial Sequence
  Description of Artificial Sequence: Synthetic primer
gggtactgctgttagagatgct

SEQ ID NO: 21332 - DNA, 19 bp, Artificial Sequence
  Description of Artificial Sequence: Synthetic primer
cgtgcctgaagctggtagg

SEQ ID NO: 21333 - DNA, 23 bp, Artificial Sequence
  Description of Artificial Sequence: Synthetic primer
ccgtatagcagcaatgtcacctg

SEQ ID NO: 21334 - DNA, 21 bp, Artificial Sequence
  Description of Artificial Sequence: Synthetic primer
tgttctccccaaatgagtgct

SEQ ID NO: 21335 - DNA, 22 bp, Artificial Sequence
  Description of Artificial Sequence: Synthetic primer
gtgcagctatttctccaagctc

SEQ ID NO: 21336 - DNA, 25 bp, Artificial Sequence
  Description of Artificial Sequence: Synthetic primer
acagatacatgtatgggttcctcag

SEQ ID NO: 21337 - DNA, 24 bp, Artificial Sequence
  Description of Artificial Sequence: Synthetic primer
ccgaggattgtactaaatgcacga

SEQ ID NO: 21338 - DNA, 21 bp, Artificial Sequence
  Description of Artificial Sequence: Synthetic primer
gcttttgtgcccagagaggta

SEQ ID NO: 21339 - DNA, 27 bp, Artificial Sequence
  Description of Artificial Sequence: Synthetic primer
gctagcaatgtttgaaatgtcatttcg

SEQ ID NO: 21340 - DNA, 25 bp, Artificial Sequence
  Description of Artificial Sequence: Synthetic primer
cctgatgcactcttgtacattttcc

SEQ ID NO: 21341 - DNA, 26 bp, Artificial Sequence
  Description of Artificial Sequence: Synthetic primer
gtttccctaccatctctgttagcaat

SEQ ID NO: 21342 - DNA, 21 bp, Artificial Sequence
  Description of Artificial Sequence: Synthetic primer
ctaaggtcggatgggcttgag

SEQ ID NO: 21343 - DNA, 22 bp, Artificial Sequence
  Description of Artificial Sequence: Synthetic primer
tgtcaggtagaatcccagaagc

SEQ ID NO: 21344 - DNA, 22 bp, Artificial Sequence
  Description of Artificial Sequence: Synthetic primer
tggattcagtgcagttcatcct

SEQ ID NO: 21345 - DNA, 28 bp, Artificial Sequence
  Description of Artificial Sequence: Synthetic primer
tgcatttgtgtaaattcggatgtatctc

SEQ ID NO: 21346 - DNA, 22 bp, Artificial Sequence
  Description of Artificial Sequence: Synthetic primer
gtccaacatattcgcgtagctg

SEQ ID NO: 21347 - DNA, 21 bp, Artificial Sequence
  Description of Artificial Sequence: Synthetic primer
cggcaggtgttagagatgctg

SEQ ID NO: 21348 - DNA, 21 bp, Artificial Sequence
  Description of Artificial Sequence: Synthetic primer
tcggcgagttcttcatcttgg

SEQ ID NO: 21349 - DNA, 21 bp, Artificial Sequence
  Description of Artificial Sequence: Synthetic primer
tagatggatgccgtggtctga

SEQ ID NO: 21350 - DNA, 25 bp, Artificial Sequence
  Description of Artificial Sequence: Synthetic primer
ggacacttgaacgtatggtgtgata

SEQ ID NO: 21351 - DNA, 28 bp, Artificial Sequence
  Description of Artificial Sequence: Synthetic primer
gggcagaaagacatttgtaaaataagca

SEQ ID NO: 21352 - DNA, 27 bp, Artificial Sequence
  Description of Artificial Sequence: Synthetic primer
tttggctttttcaattttctctcctga

SEQ ID NO: 21353 - DNA, 23 bp, Artificial Sequence
  Description of Artificial Sequence: Synthetic primer
ctgctcataggtcaaaccaggaa

SEQ ID NO: 21354 - DNA, 21 bp, Artificial Sequence
  Description of Artificial Sequence: Synthetic primer
gaaaattgcggatgggagcaa

SEQ ID NO: 21355 - DNA, 28 bp, Artificial Sequence
  Description of Artificial Sequence: Synthetic primer
cagcatcaattgattcttcttccactac

SEQ ID NO: 21356 - DNA, 19 bp, Artificial Sequence
  Description of Artificial Sequence: Synthetic primer
ggcaaagcccagcatcatg

SEQ ID NO: 21357 - DNA, 22 bp, Artificial Sequence
  Description of Artificial Sequence: Synthetic primer
cgacgacagaggatcaccatac

SEQ ID NO: 21358 - DNA, 24 bp, Artificial Sequence
  Description of Artificial Sequence: Synthetic primer
tcagtacgtaggtagagagaggac

SEQ ID NO: 21359 - DNA, 28 bp, Artificial Sequence
  Description of Artificial Sequence: Synthetic primer
tgcgtgacattcaatactagctcattta

SEQ ID NO: 21360 - DNA, 25 bp, Artificial Sequence
  Description of Artificial Sequence: Synthetic primer
cattgtcagttactcggttgtcaga

SEQ ID NO: 21361 - DNA, 21 bp, Artificial Sequence
  Description of Artificial Sequence: Synthetic primer
ggattcgcttgttcctttcgg

SEQ ID NO: 21362 - DNA, 27 bp, Artificial Sequence
  Description of Artificial Sequence: Synthetic primer
cggagtactccctacaattcttttgaa

SEQ ID NO: 21363 - DNA, 21 bp, Artificial Sequence
  Description of Artificial Sequence: Synthetic primer
gctcttcgcttcttccgtgat

SEQ ID NO: 21364 - DNA, 21 bp, Artificial Sequence
  Description of Artificial Sequence: Synthetic primer
tctccgccgcttgtatgtatg

SEQ ID NO: 21365 - DNA, 26 bp, Artificial Sequence
  Description of Artificial Sequence: Synthetic primer
tttggtcagggtttttcatttctagc

SEQ ID NO: 21366 - DNA, 27 bp, Artificial Sequence
  Description of Artificial Sequence: Synthetic primer
ggaagcttacttgttatgctcatctga

SEQ ID NO: 21367 - DNA, 24 bp, Artificial Sequence
  Description of Artificial Sequence: Synthetic primer
actttttcctgactagggagcatt

SEQ ID NO: 21368 - DNA, 28 bp, Artificial Sequence
  Description of Artificial Sequence: Synthetic primer
cggtatgatatagtgccggaaaaacata

SEQ ID NO: 21369 - DNA, 27 bp, Artificial Sequence
  Description of Artificial Sequence: Synthetic primer
gcctgtcaaacttctgatatcttctcg

SEQ ID NO: 21370 - DNA, 23 bp, Artificial Sequence
  Description of Artificial Sequence: Synthetic primer
gccttcgtttcttcttcttgctc

SEQ ID NO: 21371 - DNA, 23 bp, Artificial Sequence
  Description of Artificial Sequence: Synthetic primer
ttggtagcaactagcaagtgtga

SEQ ID NO: 21372 - DNA, 25 bp, Artificial Sequence
  Description of Artificial Sequence: Synthetic primer
gagagacagaggttgacaaactacc

SEQ ID NO: 21373 - DNA, 28 bp, Artificial Sequence
  Description of Artificial Sequence: Synthetic primer
ccctctctgttctctcttttgagtaaaa

SEQ ID NO: 21374 - DNA, 22 bp, Artificial Sequence
  Description of Artificial Sequence: Synthetic primer
aatttgagttgtgcgaggttcc

SEQ ID NO: 21375 - DNA, 28 bp, Artificial Sequence
  Description of Artificial Sequence: Synthetic primer
tgatataataggattcaagaccgaggct

SEQ ID NO: 21376 - DNA, 21 bp, Artificial Sequence
  Description of Artificial Sequence: Synthetic primer
cttgatgcacaacctcatccg

SEQ ID NO: 21377 - DNA, 23 bp, Artificial Sequence
  Description of Artificial Sequence: Synthetic primer
caaccactgatctgtttgttcgt

SEQ ID NO: 21378 - DNA, 19 bp, Artificial Sequence
  Description of Artificial Sequence: Synthetic primer
ctcaacagacgctcagcct

SEQ ID NO: 21379 - DNA, 28 bp, Artificial Sequence
  Description of Artificial Sequence: Synthetic primer
acacacctatttttgttcacaacttcaa

SEQ ID NO: 21380 - DNA, 27 bp, Artificial Sequence
  Description of Artificial Sequence: Synthetic primer
ctcatgtgaaattgtcatgctttgtct

SEQ ID NO: 21381 - DNA, 24 bp, Artificial Sequence
  Description of Artificial Sequence: Synthetic primer
acgatgatcttgtcgtaatctggt

SEQ ID NO: 21382 - DNA, 21 bp, Artificial Sequence
  Description of Artificial Sequence: Synthetic primer
gacgcagtctagcttcctcag

SEQ ID NO: 21383 - DNA, 28 bp, Artificial Sequence
  Description of Artificial Sequence: Synthetic primer
ttctgcaaataacttcctataagctggt

SEQ ID NO: 21384 - DNA, 28 bp, Artificial Sequence
  Description of Artificial Sequence: Synthetic primer
tcttagtctatagttactccagctgctt

SEQ ID NO: 21385 - DNA, 23 bp, Artificial Sequence
  Description of Artificial Sequence: Synthetic primer
ttgattcatgtagcacaccgttg

SEQ ID NO: 21386 - DNA, 24 bp, Artificial Sequence
  Description of Artificial Sequence: Synthetic primer
cagcgtacagtttgattcacttgg

SEQ ID NO: 21387 - DNA, 23 bp, Artificial Sequence
  Description of Artificial Sequence: Synthetic primer
gctgccgctactaatggtaacta

SEQ ID NO: 21388 - DNA, 24 bp, Artificial Sequence
  Description of Artificial Sequence: Synthetic primer
ccaaaactctgtctgcttcttgga

SEQ ID NO: 21389 - DNA, 21 bp, Artificial Sequence
  Description of Artificial Sequence: Synthetic primer
ttcaggcttgacttgcttcgg

SEQ ID NO: 21390 - DNA, 21 bp, Artificial Sequence
  Description of Artificial Sequence: Synthetic primer
ttgttgctgttgtcaggcaag

SEQ ID NO: 21391 - DNA, 21 bp, Artificial Sequence
  Description of Artificial Sequence: Synthetic primer
cttaagcatcgcctctctgga

SEQ ID NO: 21392 - DNA, 21 bp, Artificial Sequence
  Description of Artificial Sequence: Synthetic primer
cttcacatgttcacggtggga

SEQ ID NO: 21393 - DNA, 22 bp, Artificial Sequence
  Description of Artificial Sequence: Synthetic primer
catggctgaaacattccttggg

SEQ ID NO: 21394 - DNA, 21 bp, Artificial Sequence
  Description of Artificial Sequence: Synthetic primer
gccaatgacgcccttctgtat

SEQ ID NO: 21395 - DNA, 19 bp, Artificial Sequence
  Description of Artificial Sequence: Synthetic primer
gtactgagaccccctgtgg

SEQ ID NO: 21396 - DNA, 22 bp, Artificial Sequence
  Description of Artificial Sequence: Synthetic primer
ccacaggcgatttggatgaatg

SEQ ID NO: 21397 - DNA, 25 bp, Artificial Sequence
  Description of Artificial Sequence: Synthetic primer
atcactgttgctactcagcaaattc

SEQ ID NO: 21398 - DNA, 28 bp, Artificial Sequence
  Description of Artificial Sequence: Synthetic primer
tcagtactgatcaaagcataacaaaacg

SEQ ID NO: 21399 - DNA, 24 bp, Artificial Sequence
  Description of Artificial Sequence: Synthetic primer
acccctaaatgttgacatcagacg

SEQ ID NO: 21400 - DNA, 22 bp, Artificial Sequence
  Description of Artificial Sequence: Synthetic primer
cgtagtgagcatgaagctagcc

SEQ ID NO: 21401 - DNA, 21 bp, Artificial Sequence
  Description of Artificial Sequence: Synthetic primer
gtagtgccagcatggtgatct

SEQ ID NO: 21402 - DNA, 25 bp, Artificial Sequence
  Description of Artificial Sequence: Synthetic primer
ggtcttttatgttgggagtctggaa

SEQ ID NO: 21403 - DNA, 25 bp, Artificial Sequence
  Description of Artificial Sequence: Synthetic primer
cctcttcgttgatggtaagcatgta

SEQ ID NO: 21404 - DNA, 21 bp, Artificial Sequence
  Description of Artificial Sequence: Synthetic primer
caagaaacaagtccgccttgc

SEQ ID NO: 21405 - DNA, 21 bp, Artificial Sequence
  Description of Artificial Sequence: Synthetic primer
accacgagccacatacatgtc

SEQ ID NO: 21406 - DNA, 28 bp, Artificial Sequence
  Description of Artificial Sequence: Synthetic primer
gccaacgttttgagttttctattagtgg

SEQ ID NO: 21407 - DNA, 22 bp, Artificial Sequence
  Description of Artificial Sequence: Synthetic primer
gcgtgatggaacaatacaacga

SEQ ID NO: 21408 - DNA, 23 bp, Artificial Sequence
  Description of Artificial Sequence: Synthetic primer
gatgagatacgagtcaaccagca

SEQ ID NO: 21409 - DNA, 24 bp, Artificial Sequence
  Description of Artificial Sequence: Synthetic primer
gaaatactccggaaacaactcgtc

SEQ ID NO: 21410 - DNA, 21 bp, Artificial Sequence
  Description of Artificial Sequence: Synthetic primer
gtcaacggtcaaagggaggac

SEQ ID NO: 21411 - DNA, 26 bp, Artificial Sequence
  Description of Artificial Sequence: Synthetic primer
gcagtacaatacaagccgaaaaagat

SEQ ID NO: 21412 - DNA, 24 bp, Artificial Sequence
  Description of Artificial Sequence: Synthetic primer
gcaggagatccaactcaaatgatg

SEQ ID NO: 21413 - DNA, 21 bp, Artificial Sequence
  Description of Artificial Sequence: Synthetic primer
agcaagattgcttgccaaacg

SEQ ID NO: 21414 - DNA, 22 bp, Artificial Sequence
  Description of Artificial Sequence: Synthetic primer
agcagcagcaaatcagaagatg

SEQ ID NO: 21415 - DNA, 29 bp, Artificial Sequence
  Description of Artificial Sequence: Synthetic primer
tgtccttttgttgatacaatttaccacat

SEQ ID NO: 21416 - DNA, 24 bp, Artificial Sequence
  Description of Artificial Sequence: Synthetic primer
tgaactttgtccttgtcactgtca

SEQ ID NO: 21417 - DNA, 21 bp, Artificial Sequence
  Description of Artificial Sequence: Synthetic primer
gatggatccgagtgcagaaga

SEQ ID NO: 21418 - DNA, 28 bp, Artificial Sequence
  Description of Artificial Sequence: Synthetic primer
aaaacatccacaagctcactaattcaat

SEQ ID NO: 21419 - DNA, 21 bp, Artificial Sequence
  Description of Artificial Sequence: Synthetic primer
gccctacgtcacatgactgaa

SEQ ID NO: 21420 - DNA, 21 bp, Artificial Sequence
  Description of Artificial Sequence: Synthetic primer
catggcagcttccagcatttc

SEQ ID NO: 21421 - DNA, 27 bp, Artificial Sequence
  Description of Artificial Sequence: Synthetic primer
tcttgattatcctaaaccaagcaaagc

SEQ ID NO: 21422 - DNA, 21 bp, Artificial Sequence
  Description of Artificial Sequence: Synthetic primer
tcgtgtcccaaagcatgacag

SEQ ID NO: 21423 - DNA, 19 bp, Artificial Sequence
  Description of Artificial Sequence: Synthetic primer
ggaactcgctgtacagcgt

SEQ ID NO: 21424 - DNA, 22 bp, Artificial Sequence
  Description of Artificial Sequence: Synthetic primer
tggtgatgagcatggtgttctt

SEQ ID NO: 21425 - DNA, 30 bp, Artificial Sequence
  Description of Artificial Sequence: Synthetic primer
tttccaaacttctctgaaattgaactagag

SEQ ID NO: 21426 - DNA, 21 bp, Artificial Sequence
  Description of Artificial Sequence: Synthetic primer
agcgtctaccgggatactctg

SEQ ID NO: 21427 - DNA, 27 bp, Artificial Sequence
  Description of Artificial Sequence: Synthetic primer
gcgagatgactacaattctaaaaccga

SEQ ID NO: 21428 - DNA, 19 bp, Artificial Sequence
  Description of Artificial Sequence: Synthetic primer
tggtagttggtggctgagg

SEQ ID NO: 21429 - DNA, 21 bp, Artificial Sequence
  Description of Artificial Sequence: Synthetic primer
ggctttctcttggtgctcttg

SEQ ID NO: 21430 - DNA, 27 bp, Artificial Sequence
  Description of Artificial Sequence: Synthetic primer
tgtaaattctaggtatggaagcactgg

SEQ ID NO: 21431 - DNA, 24 bp, Artificial Sequence
  Description of Artificial Sequence: Synthetic primer
agttcaggattgccacatccatag

SEQ ID NO: 21432 - DNA, 24 bp, Artificial Sequence
  Description of Artificial Sequence: Synthetic primer
acttgaaccccttttcaacaagtc

SEQ ID NO: 21433 - DNA, 26 bp, Artificial Sequence
  Description of Artificial Sequence: Synthetic primer
tgggtgatgtgatcaaaattaacacc

SEQ ID NO: 21434 - DNA, 21 bp, Artificial Sequence
  Description of Artificial Sequence: Synthetic primer
gttcccctgccgtgaaactta

SEQ ID NO: 21435 - DNA, 28 bp, Artificial Sequence
  Description of Artificial Sequence: Synthetic primer
tccaatctttttcactgactcaatcaac

SEQ ID NO: 21436 - DNA, 28 bp, Artificial Sequence
  Description of Artificial Sequence: Synthetic primer
atcgtttagtttttgactgctgagaaat

SEQ ID NO: 21437 - DNA, 21 bp, Artificial Sequence
  Description of Artificial Sequence: Synthetic primer
tccatgtcttcgggcgtaatg

SEQ ID NO: 21438 - DNA, 28 bp, Artificial Sequence
  Description of Artificial Sequence: Synthetic primer
ctctaggtgtttttaggcatgtttacac

SEQ ID NO: 21439 - DNA, 27 bp, Artificial Sequence
  Description of Artificial Sequence: Synthetic primer
accataacaattgcagtacaaagagac

SEQ ID NO: 21440 - DNA, 28 bp, Artificial Sequence
  Description of Artificial Sequence: Synthetic primer
gcattcattagctgtgtccagttactta

SEQ ID NO: 21441 - DNA, 28 bp, Artificial Sequence
  Description of Artificial Sequence: Synthetic primer
gaattcatattgtagcccttctttggac

SEQ ID NO: 21442 - DNA, 21 bp, Artificial Sequence
  Description of Artificial Sequence: Synthetic primer
cagcgaaaagggtcgttgatg

SEQ ID NO: 21443 - DNA, 28 bp, Artificial Sequence
  Description of Artificial Sequence: Synthetic primer
cattgcttcacataatccaacgtctatt

SEQ ID NO: 21444 - DNA, 21 bp, Artificial Sequence
  Description of Artificial Sequence: Synthetic primer
acagcttattgcagcaatccc

SEQ ID NO: 21445 - DNA, 27 bp, Artificial Sequence
  Description of Artificial Sequence: Synthetic primer
agtgttgttttgaatgtattgccttga

SEQ ID NO: 21446 - DNA, 23 bp, Artificial Sequence
  Description of Artificial Sequence: Synthetic primer
gttctgaaggtgctcaacaagac

SEQ ID NO: 21447 - DNA, 27 bp, Artificial Sequence
  Description of Artificial Sequence: Synthetic primer
tgttccatcactcataactacattccc

SEQ ID NO: 21448 - DNA, 28 bp, Artificial Sequence
  Description of Artificial Sequence: Synthetic primer
acagttccctctttctgaaaataatggt

SEQ ID NO: 21449 - DNA, 28 bp, Artificial Sequence
  Description of Artificial Sequence: Synthetic primer
acacagtaacaagatggaattacagaca

SEQ ID NO: 21450 - DNA, 28 bp, Artificial Sequence
  Description of Artificial Sequence: Synthetic primer
tggagtcacaagaacatctagtctactc

SEQ ID NO: 21451 - DNA, 23 bp, Artificial Sequence
  Description of Artificial Sequence: Synthetic primer
ggtatgcccgtaacttcaacctg

SEQ ID NO: 21452 - DNA, 28 bp, Artificial Sequence
  Description of Artificial Sequence: Synthetic primer
agcaaggttaaagagagaaataagcagt

SEQ ID NO: 21453 - DNA, 22 bp, Artificial Sequence
  Description of Artificial Sequence: Synthetic primer
caaaccgggtgtagcacaaaaa

SEQ ID NO: 21454 - DNA, 27 bp, Artificial Sequence
  Description of Artificial Sequence: Synthetic primer
gggtgtgcttatattactgaagctgat

SEQ ID NO: 21455 - DNA, 21 bp, Artificial Sequence
  Description of Artificial Sequence: Synthetic primer
cgacaacgacggtttgtttgg

SEQ ID NO: 21456 - DNA, 22 bp, Artificial Sequence
  Description of Artificial Sequence: Synthetic primer
actagggcatgtttgtgtggtc

SEQ ID NO: 21457 - DNA, 27 bp, Artificial Sequence
  Description of Artificial Sequence: Synthetic primer
cgcaatatcaactcaacatctacaacc

SEQ ID NO: 21458 - DNA, 25 bp, Artificial Sequence
  Description of Artificial Sequence: Synthetic primer
agaactttgtagctgcaaatggttg

SEQ ID NO: 21459 - DNA, 21 bp, Artificial Sequence
  Description of Artificial Sequence: Synthetic primer
gacacgtcacttggtccagat

SEQ ID NO: 21460 - DNA, 27 bp, Artificial Sequence
  Description of Artificial Sequence: Synthetic primer
ttttccaatacaaaccaaaacatgcag

SEQ ID NO: 21461 - DNA, 21 bp, Artificial Sequence
  Description of Artificial Sequence: Synthetic primer
gacttgaagctccccttcctg

SEQ ID NO: 21462 - DNA, 26 bp, Artificial Sequence
  Description of Artificial Sequence: Synthetic primer
ggaaaatgctttgatttctacggcat

SEQ ID NO: 21463 - DNA, 24 bp, Artificial Sequence
  Description of Artificial Sequence: Synthetic primer
ggaaaattggcatgatccaccaaa

SEQ ID NO: 21464 - DNA, 28 bp, Artificial Sequence
  Description of Artificial Sequence: Synthetic primer
gctcagtgagtaggttgttagaaagatc

SEQ ID NO: 21465 - DNA, 23 bp, Artificial Sequence
  Description of Artificial Sequence: Synthetic primer
ccacgggataccattcaaaagga

SEQ ID NO: 21466 - DNA, 25 bp, Artificial Sequence
  Description of Artificial Sequence: Synthetic primer
taggatgattggtatgcaattcgct

SEQ ID NO: 21467 - DNA, 21 bp, Artificial Sequence
  Description of Artificial Sequence: Synthetic primer
gccttgatgctttaccggaac

SEQ ID NO: 21468 - DNA, 27 bp, Artificial Sequence
  Description of Artificial Sequence: Synthetic primer
cgatcaccgaaattttcttggaagtac

SEQ ID NO: 21469 - DNA, 27 bp, Artificial Sequence
  Description of Artificial Sequence: Synthetic primer
tcattcagtgtttcctaaaaggagact

SEQ ID NO: 21470 - DNA, 21 bp, Artificial Sequence
  Description of Artificial Sequence: Synthetic primer
ccatgtgcacccttggtacaa

SEQ ID NO: 21471 - DNA, 26 bp, Artificial Sequence
  Description of Artificial Sequence: Synthetic primer
agagatgggaacactagaaaccaaaa

SEQ ID NO: 21472 - DNA, 21 bp, Artificial Sequence
  Description of Artificial Sequence: Synthetic primer
gatgttagggccactgcatga

SEQ ID NO: 21473 - DNA, 24 bp, Artificial Sequence
  Description of Artificial Sequence: Synthetic primer
caatcaccttcactgtccaagtca

SEQ ID NO: 21474 - DNA, 22 bp, Artificial Sequence
  Description of Artificial Sequence: Synthetic primer
ggtattcgcaacaccctacaac

SEQ ID NO: 21475 - DNA, 21 bp, Artificial Sequence
  Description of Artificial Sequence: Synthetic primer
gcagtgcgaagcttgatgaaa

SEQ ID NO: 21476 - DNA, 23 bp, Artificial Sequence
  Description of Artificial Sequence: Synthetic primer
gcagtccgaatgatgaaaatccc

SEQ ID NO: 21477 - DNA, 23 bp, Artificial Sequence
  Description of Artificial Sequence: Synthetic primer
gctagggaaggaagagatcagga

SEQ ID NO: 21478 - DNA, 21 bp, Artificial Sequence
  Description of Artificial Sequence: Synthetic primer
atggagaaacagcgtagctga

SEQ ID NO: 21479 - DNA, 21 bp, Artificial Sequence
  Description of Artificial Sequence: Synthetic primer
ctcgagatcgagtcacccatg

SEQ ID NO: 21480 - DNA, 21 bp, Artificial Sequence
  Description of Artificial Sequence: Synthetic primer
ttgctccatgtcgttgccata

SEQ ID NO: 21481 - DNA, 22 bp, Artificial Sequence
  Description of Artificial Sequence: Synthetic primer
ccaagcacgttgaaagcatagt

SEQ ID NO: 21482 - DNA, 23 bp, Artificial Sequence
  Description of Artificial Sequence: Synthetic primer
ttgtacacgctgtctttgttcac

SEQ ID NO: 21483 - DNA, 22 bp, Artificial Sequence
  Description of Artificial Sequence: Synthetic primer
catctggtagagcctcttgacg

SEQ ID NO: 21484 - DNA, 23 bp, Artificial Sequence
  Description of Artificial Sequence: Synthetic primer
ggcaatctgcacctgaatgtaat

SEQ ID NO: 21485 - DNA, 23 bp, Artificial Sequence
  Description of Artificial Sequence: Synthetic primer
ggttacaatggctttcacagcag

SEQ ID NO: 21486 - DNA, 21 bp, Artificial Sequence
  Description of Artificial Sequence: Synthetic primer
gagaacctgtctgtggcatga

SEQ ID NO: 21487 - DNA, 27 bp, Artificial Sequence
  Description of Artificial Sequence: Synthetic primer
cgaagattttgaggatatggaaggtga

SEQ ID NO: 21488 - DNA, 26 bp, Artificial Sequence
  Description of Artificial Sequence: Synthetic primer
accatatttgctcacaatttcgtcaa

SEQ ID NO: 21489 - DNA, 21 bp, Artificial Sequence
  Description of Artificial Sequence: Synthetic primer
ctcctcctcctgcaacttgag

SEQ ID NO: 21490 - DNA, 21 bp, Artificial Sequence
  Description of Artificial Sequence: Synthetic primer
cagacggtgttgcgatctttg

SEQ ID NO: 21491 - DNA, 29 bp, Artificial Sequence
  Description of Artificial Sequence: Synthetic primer
ccaggaatgtacttcttaggattaagcaa

SEQ ID NO: 21492 - DNA, 22 bp, Artificial Sequence
  Description of Artificial Sequence: Synthetic primer
tgagccattttggcctcatcat

SEQ ID NO: 21493 - DNA, 22 bp, Artificial Sequence
  Description of Artificial Sequence: Synthetic primer
ttcatggatcctgtcactgacc

SEQ ID NO: 21494 - DNA, 25 bp, Artificial Sequence
  Description of Artificial Sequence: Synthetic primer
atttctttgaagagcacctgcatac

SEQ ID NO: 21495 - DNA, 26 bp, Artificial Sequence
  Description of Artificial Sequence: Synthetic primer
caaatgctatgaatgctgctgagatt

SEQ ID NO: 21496 - DNA, 21 bp, Artificial Sequence
  Description of Artificial Sequence: Synthetic primer
atcgctcatcgtctgaacacc

SEQ ID NO: 21497 - DNA, 22 bp, Artificial Sequence
  Description of Artificial Sequence: Synthetic primer
ggtacctgaaccagaactggtc

SEQ ID NO: 21498 - DNA, 23 bp, Artificial Sequence
  Description of Artificial Sequence: Synthetic primer
tcgatctaccaagggaacagaga

SEQ ID NO: 21499 - DNA, 18 bp, Artificial Sequence
  Description of Artificial Sequence: Synthetic primer
gttgtaccgcgccagctt

SEQ ID NO: 21500 - DNA, 22 bp, Artificial Sequence
  Description of Artificial Sequence: Synthetic primer
tgattctggttccggagtttga

SEQ ID NO: 21501 - DNA, 22 bp, Artificial Sequence
  Description of Artificial Sequence: Synthetic primer
ccggcgtaaccttcttgtagtc

SEQ ID NO: 21502 - DNA, 24 bp, Artificial Sequence
  Description of Artificial Sequence: Synthetic primer
agacttcctctcattccacaactc

SEQ ID NO: 21503 - DNA, 26 bp, Artificial Sequence
  Description of Artificial Sequence: Synthetic primer
tcaatggatcggatcaacaagtagtt

SEQ ID NO: 21504 - DNA, 21 bp, Artificial Sequence
  Description of Artificial Sequence: Synthetic primer
ggtgtatcacaaccagcctct

SEQ ID NO: 21505 - DNA, 23 bp, Artificial Sequence
  Description of Artificial Sequence: Synthetic primer
ccaggactcattgttggatccag

SEQ ID NO: 21506 - DNA, 27 bp, Artificial Sequence
  Description of Artificial Sequence: Synthetic primer
tcgagcagtagagtaattaaacggaga

SEQ ID NO: 21507 - DNA, 21 bp, Artificial Sequence
  Description of Artificial Sequence: Synthetic primer
ggtgatggtgacccagatgaa

SEQ ID NO: 21508 - DNA, 26 bp, Artificial Sequence
  Description of Artificial Sequence: Synthetic primer
actccatcaaaaccatgtgttgaaga

SEQ ID NO: 21509 - DNA, 28 bp, Artificial Sequence
  Description of Artificial Sequence: Synthetic primer
ccaagtaaatcttctctttttcccgaca

SEQ ID NO: 21510 - DNA, 19 bp, Artificial Sequence
  Description of Artificial Sequence: Synthetic primer
cagcggcatgttccgaaag

SEQ ID NO: 21511 - DNA, 24 bp, Artificial Sequence
  Description of Artificial Sequence: Synthetic primer
aacagagatgaacgcaccaacata

SEQ ID NO: 21512 - DNA, 23 bp, Artificial Sequence
  Description of Artificial Sequence: Synthetic primer
tcgccaagaaagagatgaggatc

SEQ ID NO: 21513 - DNA, 27 bp, Artificial Sequence
  Description of Artificial Sequence: Synthetic primer
atcataacccatctcaggtacttcttc

SEQ ID NO: 21514 - DNA, 20 bp, Artificial Sequence
  Description of Artificial Sequence: Synthetic primer
cacaccaaaggatccggcta

SEQ ID NO: 21515 - DNA, 19 bp, Artificial Sequence
  Description of Artificial Sequence: Synthetic primer
atttcctcgcgttgcctgt

SEQ ID NO: 21516 - DNA, 24 bp, Artificial Sequence
  Description of Artificial Sequence: Synthetic primer
actttccctgcttaatgagttcca

SEQ ID NO: 21517 - DNA, 26 bp, Artificial Sequence
  Description of Artificial Sequence: Synthetic primer
actgttgttgtttctcttcacatcac

SEQ ID NO: 21518 - DNA, 23 bp, Artificial Sequence
  Description of Artificial Sequence: Synthetic primer
cttgaatcgcaacgaccaatcat

SEQ ID NO: 21519 - DNA, 28 bp, Artificial Sequence
  Description of Artificial Sequence: Synthetic primer
agcctactagaattccaccattttctac

SEQ ID NO: 21520 - DNA, 21 bp, Artificial Sequence
  Description of Artificial Sequence: Synthetic primer
tagtctcttcgctgcttgctc

SEQ ID NO: 21521 - DNA, 27 bp, Artificial Sequence
  Description of Artificial Sequence: Synthetic primer
tgccacataatacattcagcatatcct

SEQ ID NO: 21522 - DNA, 21 bp, Artificial Sequence
  Description of Artificial Sequence: Synthetic primer
attcccatgctccttgagacc

SEQ ID NO: 21523 - DNA, 24 bp, Artificial Sequence
  Description of Artificial Sequence: Synthetic primer
actgctcaatgtctctcaggatac

SEQ ID NO: 21524 - DNA, 21 bp, Artificial Sequence
  Description of Artificial Sequence: Synthetic primer
ctgaggaaggcatcagggatt

SEQ ID NO: 21525 - DNA, 21 bp, Artificial Sequence
  Description of Artificial Sequence: Synthetic primer
tccttggacaggtcctaccat

SEQ ID NO: 21526 - DNA, 21 bp, Artificial Sequence
  Description of Artificial Sequence: Synthetic primer
aggtgttcacggtcgtcacta

SEQ ID NO: 21527 - DNA, 23 bp, Artificial Sequence
  Description of Artificial Sequence: Synthetic primer
cattaaggtcgaacttgccgaga

SEQ ID NO: 21528 - DNA, 18 bp, Artificial Sequence
  Description of Artificial Sequence: Synthetic primer
ctgtcggacgcgagcaag

SEQ ID NO: 21529 - DNA, 21 bp, Artificial Sequence
  Description of Artificial Sequence: Synthetic primer
ggatgtcgcacactttcctct

SEQ ID NO: 21530 - DNA, 21 bp, Artificial Sequence
  Description of Artificial Sequence: Synthetic primer
ttgagaagccttcagccatcc

SEQ ID NO: 21531 - DNA, 22 bp, Artificial Sequence
  Description of Artificial Sequence: Synthetic primer
gccgaagaagaggatctgaagc

SEQ ID NO: 21532 - DNA, 18 bp, Artificial Sequence
  Description of Artificial Sequence: Synthetic primer
caccgacgtcatccacga

SEQ ID NO: 21533 - DNA, 21 bp, Artificial Sequence
  Description of Artificial Sequence: Synthetic primer
gacaaggtcctcctgactgac

SEQ ID NO: 21534 - DNA, 26 bp, Artificial Sequence
  Description of Artificial Sequence: Synthetic primer
acaatgtctccagtaacagtatcagg

SEQ ID NO: 21535 - DNA, 21 bp, Artificial Sequence
  Description of Artificial Sequence: Synthetic primer
ctccttctgtgcgtttgtcac

SEQ ID NO: 21536 - DNA, 26 bp, Artificial Sequence
  Description of Artificial Sequence: Synthetic primer
ccaattaagcctgatcacaaagatgt

SEQ ID NO: 21537 - DNA, 21 bp, Artificial Sequence
  Description of Artificial Sequence: Synthetic primer
gacggatctcactgacttcgg

SEQ ID NO: 21538 - DNA, 26 bp, Artificial Sequence
  Description of Artificial Sequence: Synthetic primer
agaacgttggatgataacatttgctc

SEQ ID NO: 21539 - DNA, 21 bp, Artificial Sequence
  Description of Artificial Sequence: Synthetic primer
agagccaatgccaaatcctga

SEQ ID NO: 21540 - DNA, 21 bp, Artificial Sequence
  Description of Artificial Sequence: Synthetic primer
gcccacttccttgaccctaag

SEQ ID NO: 21541 - DNA, 24 bp, Artificial Sequence
  Description of Artificial Sequence: Synthetic primer
tgccatgcaagatggagtaacttt

SEQ ID NO: 21542 - DNA, 21 bp, Artificial Sequence
  Description of Artificial Sequence: Synthetic primer
gaagaacagctgtccagggat

SEQ ID NO: 21543 - DNA, 23 bp, Artificial Sequence
  Description of Artificial Sequence: Synthetic primer
ccttgttcatcctggccatctag

SEQ ID NO: 21544 - DNA, 21 bp, Artificial Sequence
  Description of Artificial Sequence: Synthetic primer
cagccatctcagcaattccac

SEQ ID NO: 21545 - DNA, 21 bp, Artificial Sequence
  Description of Artificial Sequence: Synthetic primer
gtgtgaaccttcttggtgctg

SEQ ID NO: 21546 - DNA, 24 bp, Artificial Sequence
  Description of Artificial Sequence: Synthetic primer
aaaacttgttctttttccgcaggt

SEQ ID NO: 21547 - DNA, 22 bp, Artificial Sequence
  Description of Artificial Sequence: Synthetic primer
ctaccattgagatcgactcgct

SEQ ID NO: 21548 - DNA, 28 bp, Artificial Sequence
  Description of Artificial Sequence: Synthetic primer
aacaatctgatagctagctctttgacaa

SEQ ID NO: 21549 - DNA, 21 bp, Artificial Sequence
  Description of Artificial Sequence: Synthetic primer
tcgtcgtcttctcgtatccac

SEQ ID NO: 21550 - DNA, 26 bp, Artificial Sequence
  Description of Artificial Sequence: Synthetic primer
tgcaacatagtatccaaggtatcagg

SEQ ID NO: 21551 - DNA, 21 bp, Artificial Sequence
  Description of Artificial Sequence: Synthetic primer
ggagctttcttcttccgacca

SEQ ID NO: 21552 - DNA, 23 bp, Artificial Sequence
  Description of Artificial Sequence: Synthetic primer
ggtaccaagatggtcctctacct

SEQ ID NO: 21553 - DNA, 26 bp, Artificial Sequence
  Description of Artificial Sequence: Synthetic primer
aaacattgttcccatcatatgccatc

SEQ ID NO: 21554 - DNA, 22 bp, Artificial Sequence
  Description of Artificial Sequence: Synthetic primer
tcagcaccaacttcttcgtagt

SEQ ID NO: 21555 - DNA, 21 bp, Artificial Sequence
  Description of Artificial Sequence: Synthetic primer
ggtacagtcctggagctcaaa

SEQ ID NO: 21556 - DNA, 21 bp, Artificial Sequence
  Description of Artificial Sequence: Synthetic primer
attgcatttctagcggcaacc

SEQ ID NO: 21557 - DNA, 21 bp, Artificial Sequence
  Description of Artificial Sequence: Synthetic primer
gcgacgcataactgcatttcg

SEQ ID NO: 21558 - DNA, 21 bp, Artificial Sequence
  Description of Artificial Sequence: Synthetic primer
tctatggaggccatgttgcag

SEQ ID NO: 21559 - DNA, 23 bp, Artificial Sequence
  Description of Artificial Sequence: Synthetic primer
tggagtgatgaatcccttctcct

SEQ ID NO: 21560 - DNA, 21 bp, Artificial Sequence
  Description of Artificial Sequence: Synthetic primer
cagtgtcacagaaggcaatgg

SEQ ID NO: 21561 - DNA, 18 bp, Artificial Sequence
  Description of Artificial Sequence: Synthetic primer
tggcccactcggtgagat

SEQ ID NO: 21562 - DNA, 22 bp, Artificial Sequence
  Description of Artificial Sequence: Synthetic primer
tcgtggatttgcttgcacctta

SEQ ID NO: 21563 - DNA, 21 bp, Artificial Sequence
  Description of Artificial Sequence: Synthetic primer
ggatatggcaacctcatggct

SEQ ID NO: 21564 - DNA, 19 bp, Artificial Sequence
  Description of Artificial Sequence: Synthetic primer
aagagacgccgccaatgta

SEQ ID NO: 21565 - DNA, 21 bp, Artificial Sequence
  Description of Artificial Sequence: Synthetic primer
gtttggctcgcaaaaccagtg

SEQ ID NO: 21566 - DNA, 22 bp, Artificial Sequence
  Description of Artificial Sequence: Synthetic primer
cggaggtaggtgaatccaaaca

SEQ ID NO: 21567 - DNA, 21 bp, Artificial Sequence
  Description of Artificial Sequence: Synthetic primer
agtacgatgccagagccaaac

SEQ ID NO: 21568 - DNA, 28 bp, Artificial Sequence
  Description of Artificial Sequence: Synthetic primer
ctcaagcaataagagtaacacaaccaag

SEQ ID NO: 21569 - DNA, 20 bp, Artificial Sequence
  Description of Artificial Sequence: Synthetic primer
gacaacacacggtggctaca

SEQ ID NO: 21570 - DNA, 23 bp, Artificial Sequence
  Description of Artificial Sequence: Synthetic primer
tcaccagttcttctaggtgttgc

SEQ ID NO: 21571 - DNA, 29 bp, Artificial Sequence
  Description of Artificial Sequence: Synthetic primer
agattatcatttcgacagatgtaacatgg

SEQ ID NO: 21572 - DNA, 24 bp, Artificial Sequence
  Description of Artificial Sequence: Synthetic primer
agtaccaaccaaaaacgacatcca

SEQ ID NO: 21573 - DNA, 21 bp, Artificial Sequence
  Description of Artificial Sequence: Synthetic primer
aaggtagccaaatgcctcgtc

SEQ ID NO: 21574 - DNA, 21 bp, Artificial Sequence
  Description of Artificial Sequence: Synthetic primer
acatccacgacggtgtctaca

SEQ ID NO: 21575 - DNA, 19 bp, Artificial Sequence
  Description of Artificial Sequence: Synthetic primer
gtgacggtgaccaggagga

SEQ ID NO: 21576 - DNA, 22 bp, Artificial Sequence
  Description of Artificial Sequence: Synthetic primer
gccgtcatagtatccaggagtg

SEQ ID NO: 21577 - DNA, 21 bp, Artificial Sequence
  Description of Artificial Sequence: Synthetic primer
cccaggcttcacaatgctctt

SEQ ID NO: 21578 - DNA, 23 bp, Artificial Sequence
  Description of Artificial Sequence: Synthetic primer
agctgctccaatttaccataccc

SEQ ID NO: 21579 - DNA, 28 bp, Artificial Sequence
  Description of Artificial Sequence: Synthetic primer
acttgaacaatccttaggtatctctgtc

SEQ ID NO: 21580 - DNA, 24 bp, Artificial Sequence
  Description of Artificial Sequence: Synthetic primer
cctcctcaatcatctagtcgacct

SEQ ID NO: 21581 - DNA, 23 bp, Artificial Sequence
  Description of Artificial Sequence: Synthetic primer
cgggccattttggagagaatagg

SEQ ID NO: 21582 - DNA, 18 bp, Artificial Sequence
  Description of Artificial Sequence: Synthetic primer
ggctcgttcgtacgggtt

SEQ ID NO: 21583 - DNA, 22 bp, Artificial Sequence
  Description of Artificial Sequence: Synthetic primer
agagaagcccatacaggcagta

SEQ ID NO: 21584 - DNA, 19 bp, Artificial Sequence
  Description of Artificial Sequence: Synthetic primer
tgatagcccccaccgaatc

SEQ ID NO: 21585 - DNA, 27 bp, Artificial Sequence
  Description of Artificial Sequence: Synthetic primer
cagttaaaccagtttctacaacacgaa

SEQ ID NO: 21586 - DNA, 27 bp, Artificial Sequence
  Description of Artificial Sequence: Synthetic primer
tcatccatttccatatattgggcaagt

SEQ ID NO: 21587 - DNA, 21 bp, Artificial Sequence
  Description of Artificial Sequence: Synthetic primer
gttattgcaagccccttggtg

SEQ ID NO: 21588 - DNA, 25 bp, Artificial Sequence
  Description of Artificial Sequence: Synthetic primer
agagttgctttctgtaaccctctca

SEQ ID NO: 21589 - DNA, 23 bp, Artificial Sequence
  Description of Artificial Sequence: Synthetic primer
ggaaattgaggcaccaacattgc

SEQ ID NO: 21590 - DNA, 22 bp, Artificial Sequence
  Description of Artificial Sequence: Synthetic primer
aaccagatcatgtgcaaccttg

SEQ ID NO: 21591 - DNA, 23 bp, Artificial Sequence
  Description of Artificial Sequence: Synthetic primer
tgcatattcattagctgccttgc

SEQ ID NO: 21592 - DNA, 27 bp, Artificial Sequence
  Description of Artificial Sequence: Synthetic primer
ctctgaattcaacagatctccttgaca

SEQ ID NO: 21593 - DNA, 26 bp, Artificial Sequence
  Description of Artificial Sequence: Synthetic primer
tgcaaatcattcagacaccaagcata

SEQ ID NO: 21594 - DNA, 21 bp, Artificial Sequence
  Description of Artificial Sequence: Synthetic primer
ctgcctgacatcctcgtcatg

SEQ ID NO: 21595 - DNA, 19 bp, Artificial Sequence
  Description of Artificial Sequence: Synthetic primer
catctccccgtgtgaggtc

SEQ ID NO: 21596 - DNA, 19 bp, Artificial Sequence
  Description of Artificial Sequence: Synthetic primer
tgagggtctcttgggctca

SEQ ID NO: 21597 - DNA, 21 bp, Artificial Sequence
  Description of Artificial Sequence: Synthetic primer
ctaatgctgccctgaagccaa

SEQ ID NO: 21598 - DNA, 23 bp, Artificial Sequence
  Description of Artificial Sequence: Synthetic primer
gtcaagtttgcctttctccatcc

SEQ ID NO: 21599 - DNA, 21 bp, Artificial Sequence
  Description of Artificial Sequence: Synthetic primer
tgaagttcgccttgatagcct

SEQ ID NO: 21600 - DNA, 22 bp, Artificial Sequence
  Description of Artificial Sequence: Synthetic primer
ccaaggaggtcggatggaacta

SEQ ID NO: 21601 - DNA, 28 bp, Artificial Sequence
  Description of Artificial Sequence: Synthetic primer
ggagaatgtcaagagtgattatggtcag

SEQ ID NO: 21602 - DNA, 22 bp, Artificial Sequence
  Description of Artificial Sequence: Synthetic primer
ccctacgttcgaaatcgtttcc

SEQ ID NO: 21603 - DNA, 26 bp, Artificial Sequence
  Description of Artificial Sequence: Synthetic primer
cctgtccaataatgcatccttctgta

SEQ ID NO: 21604 - DNA, 26 bp, Artificial Sequence
  Description of Artificial Sequence: Synthetic primer
ttcatcaggatcagtgacagattcat

SEQ ID NO: 21605 - DNA, 29 bp, Artificial Sequence
  Description of Artificial Sequence: Synthetic primer
ctaaactctcaggctataatctcgattca

SEQ ID NO: 21606 - DNA, 25 bp, Artificial Sequence
  Description of Artificial Sequence: Synthetic primer
tgacacaatccaaaaccactctagc

SEQ ID NO: 21607 - DNA, 23 bp, Artificial Sequence
  Description of Artificial Sequence: Synthetic primer
gcatatgcttttggcgaatttgg

SEQ ID NO: 21608 - DNA, 27 bp, Artificial Sequence
  Description of Artificial Sequence: Synthetic primer
aggaatatgttccacttcttgatgtct

SEQ ID NO: 21609 - DNA, 21 bp, Artificial Sequence
  Description of Artificial Sequence: Synthetic primer
aggctgtcaccattgttgaga

SEQ ID NO: 21610 - DNA, 24 bp, Artificial Sequence
  Description of Artificial Sequence: Synthetic primer
tgaaaggagcttcatcaccaagat

SEQ ID NO: 21611 - DNA, 26 bp, Artificial Sequence
  Description of Artificial Sequence: Synthetic primer
agatttaagttctgttcatgcgcatt

SEQ ID NO: 21612 - DNA, 21 bp, Artificial Sequence
  Description of Artificial Sequence: Synthetic primer
tcttttgcgacgcttctcatc

SEQ ID NO: 21613 - DNA, 27 bp, Artificial Sequence
  Description of Artificial Sequence: Synthetic primer
caacagagtcgtttaacagacagaatt

SEQ ID NO: 21614 - DNA, 21 bp, Artificial Sequence
  Description of Artificial Sequence: Synthetic primer
aggtcaaagctgaccgtgatg

SEQ ID NO: 21615 - DNA, 21 bp, Artificial Sequence
  Description of Artificial Sequence: Synthetic primer
ttccagcacgcactcagatac

SEQ ID NO: 21616 - DNA, 19 bp, Artificial Sequence
  Description of Artificial Sequence: Synthetic primer
agttgtacgcgtcgtacct
